United States Patent Application Publication US 2025/0205292 A1 - sequence listing, part 14

SEQ ID NO: 21 - DNA, 2319666 bp, Bifidobacterium longum
  source 1..2319666: mol_type = genomic DNA
atggttaacgcttccggcgaccccgtaatcgaggccgcccacatctggtcagacacgctgacggtgctcaaacacagcgcttcgctcagcccacgagaaaaaggctggttggaaggcgttgttcctgaaggcgtcttcggttcgaccatcgtgctgtgtgtggacaacaacgacacgcttcaagccattcagggtgatttgaacgattccctgcttcaggcattgcgtacggtaaccggcgaaaatatgtttcccgcgttcaaggtcgtgccgaaaaccgagcccgaaccgctttcggaggcaaagccggcgcagccatatccttcggaaatttctccgactgtcgccgaattcggtaaagaatcctatggtgcaaagccggcagccgcaccgcgggaaccgatgcccgccaccgagccgcagttcccggtcggtcagcagaagatgaatcgcgatcccgagactcatctcaataagaacttcacgtttgattccttcgtgcccggcgattccaaccgttttgcccgtacggtcgcactggccgtggccgaaggttccgggcaggatttcaacccgttgtgtatctatggcggatcgggcctgggcaaaacccacttgctgaacgccatcggcaactatgcactggtcaaggatcccgggctgaaggttcgatacgtcacgtctgaggaattcacgaacgaattcattgacgcgctgcaaaacccgaaccaaagccagggtcagattgctgaattcaaccgtcgataccgacaggttgatgtgttgcttattgacgatatccagttcctcggcggcaaggaagccaccttggatcagttcttccatacgttcaatgcactgcatcaggcaaataagcgtattgtcattgcttccgatgtagcgcccaagaatttgaagggtttcgaggctcgactcatctcgcgcttcgaatccggcctgaccgtagacgtcaagccgccggatctggagacccgaatcgccattcttcgcatgatcgcctcgatgaacggctcgaaaatccccagcgatgtgttggacctcatcgccgaacgcttcaccgagaacattcgtgaactcgaaggcgcgctaacccgtgttacggccgtggcctcgctgagtaatcagccggtgacccgcgccttggccgagcagacgttgcaggacttcttcaccaccgatgtggaaatcaagcccacggacatcatcagtcaggtggcgaagtacttccacctgacgtttgaggatcttgtcggtaaatcacgaaccaaaaacgtggctgttcctcgtcagatcgccatgtacctggctcgcgaaatgaccagtatgagcctgatggatattggccaggtctttggcggacgcgatcacaccacagtaatgcatgcctgcactcgaatcagtgaccgaatgcagcaaaaacaggagatctataactacgttatggagctcacggttcgcctcaagcaaagcaacaccaactgacacaacgcttctgagagacgaaaaacggcacttttcggactgactttccgaaaagtgccgtttttggttgctcaggcggattctggtggatacgtcgaggcaacggattcgagacattagattcctcatggctcccctttgtgaggggatctgtcggcgcagacgactgaggggagtttcgaaggggagcacgcaaaaaaaccatgaaacgagagaatcgattctgaggaccgattttgcgggtttgagcgagcgagacggaaaaagtgccgaaaacggtctccagaatcgattctcctcgacgaaaaacagccttcaacacgccgtgcgaaagtgcgaaaaccaaaaaagttatccacatagttgtgcacagatgtgggtaaactcggcggataactcgtggattacccactattttgttgtggaaaactcgtgcataaccgcgacctcgatgtggaaaactcaaattcgacgaactagctgtggaaaactcgcccacttatccacaagccatacagattttgtccacaattttcagggacttatgaaccgttgcagttgtagggctcagccctacttatccacactatccaccggccttattatggcgattacttactcagttacgtgaaaagcatcatcgccatagtaacagccggtcatccagcgtacgtaagttcgccacccaacggctagaatatttctcagccaatccgacgaagggaacaatcacacatgaaagtcgaaatcgataccgcagccctggccgacgccgtagcctggacctcccgagtcatcgacgcacgtccctccaacccgattctcgctggcgtcaagctggaagccattgacggaacgctgcaattctccgccttcaactacgagatttccgctcgccaccacatcgaagccggcgttgacgaagccggttccgtactggttcagggcaagctgctggccgatatcaccaaatcgctgcgttcggagaaaacgtacctggtcaccgacggctccacgctgaccatcacgtccggcaagtcgaagttcaccttgcagctcatgcccgacaccgagtacccggatctgcccgtggtaccggccatgctcggccaagtcgatgccccgactttcgttcaggccgtgaaccaggcgtgcgttgccgtctcccgcgaagaaaaccgcccggtactgaccggcgttcgcatgcaattccaaggcgacaaggtcgtcatgacctccaccgatcgcttccgtttggcccgcgccaccttcacttggactccgcagaacccggacgtcgacaccaccacgctggttcgcggctccctgctcaaggatgtggcccgtgctcttgacgagcaccagaacatccgccttgatttcgatgccgatagcccgacgctgctcggcttcgaaaacgccggccgcgtctccacctcccagctcatcgacggtgaattcccggcggtcgaccgcctgttcgccgacgaatatccgattcaggccgtagtcaacaagcaggatttgctcgatgccatcagccgtgtggctttggtcgccgaacgcaatgctccgattcgcatgaccttcaccggtcaggaagtggcgctgtccgccggatcggtcgacgaggctcaggctaacgaaacactggacatcgacatggatggcgacgacatcaccgtggcattcaacccgtcctacctgaaggagggtctgtccgccgtaaccgaaccattcgtgcgcatcaaaatgacgaccccggtcaagccggtcgagttcaatggccagcaggaagctgattccgacgagtccatggactaccgatacctgctcgtgccgatgcgctttaacaactgaaatccctgaatttccaacgattcgctaatgcacatctcccgtctcgcactcgaccactaccgctcatggagtcaggtagtggtcgatttcgtaccaggcgtgaatatcctgttcggcaagaacggtctgggcaaaaccaatctggtggaagccgtcgaagtgctgtccaccggatcgagccatcgcacgtccagcacgttgccgctgatcgaacgcgggcagaccacggccaccatccgcgcgaacgtcgctgatgatgccggtcaaaccactacgtatgaagcgtcaattcatgcgcgtggtgccaaccgagcccgcatcaactcggggtcgtcgctgtatctgcgcgatatcatcggcaagattcccagcgtttccttcactcccgaagatcagcgattggtgtccggcgatccgggagcacgccgcaccatgatgaatcaggctgcggctctgctcgagcccggatacatgcagacgttgcaacagttcacgcgcatcgccaaacagcgtgccacattgttgaagcaattgaatgccaatgccaacaatggccagccgatggatgcggttctgagcggtttggaaatctggaccggccagttcatcgaagctggtgtggcgttgacccgtatgcgcgctcatgtgatcggtctgattgccgagccatttgccgtgatttacgccgacttggccggtgccggcgagcaggtgacgctcacatatgcgccttcattcgacgaagtgctgatgttcgacgatccgcatccgcagattagcgagcatttccaacgcatctaccccggtgaagtggctcgcggcgtgaaccttatcggtccgcagcgcgatgacatgaaccttgagttggccggtattcccgcccgcgagttcgcttcgaacggcgagatgtggacgatggcgctggccttgaaaatggcattgttcgaaatagtgcgtgaccggttgggattgcagccgattgtgattctcgatgatgtgttcgcccagcttgacgacagccggcgcacgcagattcttgatttcgccagaaaacaggatcaggtgctgattaccgtggccgctgagggcgatgtgcccgactatgaatcggcccatcgcatcgacgtggccgcactggacgaaccagcttccgtgatattgccaactctgggcaatttgtccaattcgcgggaaaatgagagtttgggtgggtatgacgaaaaaaccgcggtggacagcgcgtccgtagaacggaaagtgtcatgaacccgccgatcgcccgccaactcaacctggacgagaccaaactgccggccgaaatattcgagcggctctcccgtcgcggggcgaccttgaaggactacagacgccgccgtgaagaggccatcgaaaacttcggcaaaccggggcgcgatccggctgaactgggcagcgtgatgaccaccatcgccggcaacggcgtctggacggcgaatatgaagcttgcgcaattgcgcaaccattgggaccaagtggtgggtcaggccatcgccagccattcggcagtcgccgatttcactgacggcgtactgaccatccgcgccgaatccacggtctgggccacgcagctgacctaccttatcccccaactcaccgataccatccgtcgcaatctcaaaggattgaccatcaccgagattcgcgtgaccggcccggccgccggatacacacgcaaatgggctcggcggcggtagccaagataccaaacaaattcgcagaagcctcgctatggcgctcgtcgggttagacgagtaaaatcacatgcagtatggtcaaatggctagaagagccctttacgggcctcgtaagccatatcacctccgtgaatgaccttcatgacggaggttgaccctgtagtcacggaaggaagcctgttggcagacgaaaccagcaaagaggagcagctgaaggcggctgcggaacgcatcaacaatgtggaattgaccgaaggcgaacttgacgaatccatggcccccgagcattatgaggcctccgatctgagggtgctcgaaggacttgaggccgtgcgtatccgccccggtatgtacatcggttccaccggcccgcgcggtttgcaccacctggtctatgagatcgtcgacaactcggtcgacgaggcgctggccggatacgccagccatatcgagatcaccattctgccggacaacggcatccgtgtggtggacgatggtcgaggtatcccggtcgatgaggtgcccggcgagggcgtctctggtgtggagaccgtgatgaccaagctgcacgccggcggcaagttcggcggcggcggttatgcagtgtccggaggtctgcacggcgtgggcatctccgtggtcaacgcactctccacccgcgtggacatcgaagtgcgccgtcagggcttccactggacccagacgtacatcgaccagcaccccaccgcgcccttgaagcagggcgagccgatgaccgaaggcgagtccaccggtacgtctgtgactttctgggccgacccgaagattttcgagaccaccatctacgacttcgagacgctgcgttcccgcttccagcagatggccttcctgaacaagggcctcaagatcagcctgactgacgagcgtgagaacgaccaggccggcgacgaggtggccggcgacgccgcggacgagcccggcgcaaagcaccagaccgtcacctaccagtacctcaacggcatcaaggactacgtcgactatctggtcaaggtgcgcaaggccacgccggtggaagaggacgtcatcagcttcgaggccgaagacctgaagctcggcatctccgccgaactcgccatgcagtggaccactgcctactccgaggccgtgcacaccttcgcgaacacgatctccaccaccgagggcggtacccacgaggagggcttccgcgccgcgctgacttcgctggtcaaccgttacgcgcgagacaagggcatcctcaaggacaaggacgagaacctctccggcgacgacgtgcgtgaaggcctgaccgccgtgatctccgtcaagctcaccaacccgcagttcgaaggccagaccaagaccaagctcggcaactccgaagccaagaccttcgtgcagcgcgtgatgaccgacaagctcggcgactggttcgacgcccacccggccgaggccaagaacatcatccagaaggccatcgaggcctcccgtgcccgtctggccgccaagaaagcccgcgagaacacccgccgcaagtccatcttcgagtccgccggcatgcccgacaagctcaaggactgccagtcgaacaacccggaagagtgcgagctgttcatcgtggagggcgattccgcaggcggctccgccatccagggccgcaacccgatcacgcaggccatcctgccgctgcgaggcaagatcctcaacaccgagcgcgccagcctggaccgcatgatgaagtccgacaccatcgaatcgctgatcaccgcggtcggcggcggctacggcgaggacttcgacatctccaaggtccgctaccacaaggtcatcatcatggccgatgccgatgtggatggtgcgcatatcgccaccctgaacctgacgctgttcttccgctacatgcgcccgatgatcaccgccggctacgtgtacgtggccatgccgccgctgtaccgcctgaagtggaccaagggcccgcacgacttcgtgtacaccgacgccgagcgcgaccgcgtgctcgccgaaggcaaggccaacggacgccagctgcccaagggcgaaggcatccagcgctacaagggtctgggcgagatgagctaccaggagctatgggagaccaccatggaccccgagcaccgcattctgaagcaggtgcacatcgaggacgccgccgcggccgacgagaccttctcgatgctgatgggcgatgaggtcgaaccccgccgcctcttcatccagcgcaacgccaagaacgtgcgttggatcgatgcgtaacggaatcctccaacctccctcgtcagagggaggtacacaacggacttagacaactaaaggaacaacagtggcagatgaaaacaacaccggcgacgagcagttcacgccggacggctcgatggagccgttgagcccgcaggaggcggacactaccgactacggcctgatggacaccggcgaacgcatccagcgcaaggacctgcagcaggagatgcgcgagtcctatctggcgtatgccctctccgtgatcgtcgagcgcgccctgccggacgtgcgcgacggtatgaagcccgtgcatcgccgcgtgatctacgcgatgtacgacggcggctaccgccccgatcgcggctacaacaagtgctcccgcgtggtcggcgacgtgatgggtaagtaccacccgcacggcgactccgccatctacgacactttggtgcgtatggcccagtcctggtcgatgcgcaacatgctcgtcgacggccagggcaacttcggctcccccggcgacgacccggccgccgccatgcgttacaccgaatgccgtatggccccgctggccatggaaatggtgcgcgacatcgacaaggacaccgtcgacttcgtgcccaactacgacggcaagacccaggagccgaccgtgctgccggcccgcttcccgaacctgctcgtcaacggctccgccggcatcgccgtcggcatggccaccaacatcccgccgcacaacatgcgcgaggtggcggacggcgtccactgggcgctcgaccacccggacgccagccgcgaggaactgctggaaaacctgatccgcatcatcaagggaccggacttccccaccggcgccaccatcctcggccacaagggcatcgaacaggcctaccgcaccggccgtggcctgatcaccatgcgtgccgtggtcaacactgaggagatcaacggccgtatgtgcctggtggtcaccgaactgccctaccaggtcaacccggaccgcctcgtcgtctccattcgtgaggccgtgcgcgacggcaagatccagggcatcgccgacatgcgcgacgagacctccggccgtaccggccagcgcctcgtgctcgtgctcaagcgcgacgccgtgccgaaggtggtcctgaacaacctgtacaagcactcccagctgcagcagaccttcggcgccaacatgctggcgctggtcgacggcgtgccgcgcacgctgagcctggacgccttcatccgccattgggtgaaccaccagctcgacgtgatcgcccgccgcaccgcgtacctgaagcgcgaggccgaagagcgcgaccacatcctgcagggctatctgaaggccctcgacatgctggacgaggtcatcgccctcatccgtgcctccgaagacaccgacaccgcacgtacgggccttatggggctgctggacatcgaccaggtgcaggcggacgccatcctggccatgcagctgcgcacgctgacccgcatgaaccgcgacaagatcgtggccgagcatgaggaattgcagcgcaagatcgccgactacatcgacatcctcgccaagccggaacgccagcgcaagatcatcggcgacgagctcgacgagatcgtcgccaagtacggcgacgaccgccgcaccaagatcctgccgttctccggcgagatgaacgtcgaagacctgatcgccgaagagaacgtggtggtcaccgtgacccactccggcttcattaagcgcaccaaggccgacgaataccgctcccagcaccgcggcggcaagggcatcaagggcaccaagctgcgcgaggacgacgtggtggatcacttcttcctgacctccacgcacaactggctgctgttcttcacgaacaagggccgcgtgtaccgcatcaaggcctacgagctgcccgagggcgcgcgcgactccaagggccagcacgtggccaacctgctgcagttcgcgcctgatgagtccatccagaccgtgctgtccatcccgaactacgaggtggccaagtatctggtgctcgccacccgttccggcaaggtcaagaagaccccgctggccgagtacgattccccgcgccagggcggcctgatcgccgtgcgcctcatggccgacgagaacggcgagaacgccgacgagctcatcggcgccgcgctgtgcaacgccgaggacgacatcatcctggtctccaaactcggcatgagcctcaagttccaggccgacgacgagcagctgcgcccgatgggccgccagaccgccggcgtgcagggcatgaagttccgtaacgacgacagcctgctggccatggatgtggtccctggcgactccgacaaggacctgttcgtggtcaccaacgagggcttcgccaagcgcaccgccatcagcgaataccgtctgcagggccgcaatggcctgggtatcaaggccgtgcaactggtcgagggccgcggtgctctggtcggcgcgctcgtggtgtccgaagacgatcaggttatggccatcatgaagtccggcaaggtgattcgctccaacgtggacgaagtcaagcgcaccgggcgcaacacccagggcgtgacctttgccaagcccgacaagggcgacacgattctctccatcgcccgtaacgaggagaaggacgagcccgaggatggcggcgatgccgcggcgaacggcaccgccgagaccgcacaatccggcgagaatgtgaacaacgcggacgaggcgtgagcagcgtcctgaaaagctggtagcctcgcatacagcagaggctaccgccaagcctgttaaggagaaacgatgagcgagaatctcgaagacaacgagccccggatcataccgccggcagtcggcaatacgcagaacgagcatgtcgagccgctgatcggtactgagcacgctccccgcgtggcacgctccgtgtccagcgatccggaagaatccgcgttgccttcttcaggtgccgccactcccgtgcgtccggcacctcgccgtagcgcccccagggctcgccgcatgagcttgtcgctgacccgcgtggatgcttggtccgtggccaaggtgacgttcatgctgtccatcgccgtggcgattattcaggtcgttgcctccgcgatcgtatgggtgctgcttgatgtggtcggtgtattcagccagattacgcagattgtgtcttccaccggtcttgatgcaggcggtttcgatctcaagaacgtgttgtcccttaccaccgtggtctccggcgtcaccatcttctcgattgtcgaagtggtgatcttcactctgctggccaccattgcggcactgatctacaacgtggtcagctctctggtcggcggtgtgcacgttacgctcggcgacgactgatatagctatactgacggaactcccctcagtgaaccgcaccccggttgttggactgaagtaattcagattcgatgatcggaggtgcggtttcttatgtgtggggatcgcaggcgtcgttgctgggccgagacttgggactccggcgacgctgggggtggcaggcgtcggtgttgggacagattttgtatctctgacgacgctgtggagggcttaccgtcgtcagcggtacagatcttggagttctgccgacgctgagggtgcgttctgtgtcgtatgcgtccaattcttggccctctgccgacgctgggcacagcaagcgtcgttgctgggccaagttttggactgccgccgacgcggagaatgcacacagcggtgttggtctgccagcgtgtggcagcttggcgccgctggggaagtcatgagtcccattccaacccattaccatgtttggtatggatacgcatatgagcttcgagactatggcgcgcaagggtggtatgcgcgtggtgttctatgcggtgcgcacgctggttttgggtgcgcttaccattgcggcgattgcgggcttcggaacggtggtcccgctttgcgttacgcactctgtggttttgcagcactcttcgtttttgagcttatccttcgccgcgccccgtgggatttcatacctcggtgatggtattgctgcctcgggccaatgcaaaaaactagtggaacgcaaatgacccgtgttgtctcatctaatcaggagagacaacacgggtcatttacgcaatgtgtgtagcttgcgcggcgatatgctccgcacgctatcgcgtcagaggcgtcacagcacgccctgggcaaccatggcgttggcgaccttgacgaagccggcggcgttggcgccgagcatcaggtcaccctcgtgaccgtattccttggcggcggccagggagttggcgacgatttcttccatgatggacttgagcttggcgtcgacctcttcgaaggtccaagacaggcggtagctgttctggctcatctccaggccggagacggccacgccaccggcgttggcagccttggccgggccgtacagcacgccgttcttctggtagacctcgatggcctccggggtggacggcatgttcgcaccctcgacgaccacggtcacgccgttgtccacgagcttctgtgcggattcgccatcaacctcgttctgggtggcgcacggcagagcgatgtcgcccttgacggtccacacgcccttgctgccctcgtggtactcggagcccggaacgcgctcggcgtattccttgatgcggccgcgctcgacttccttgatctgcttgacgacctcgacgttgatgccgttcgggtcgtagatgtagccgttggagtcggagacggtgacgaccttggcgcccaactgctcagccttctgagcggcgtaggtggccacgttgccggagccggagatcacgacggtcttgccctcgaaggagtcgttgcgcagcacgcgcagggcttcctgggtgtagtagcacacgccgtaaccggtggcctcggtgcgggccagggaaccgccgaattccagacccttaccggtcaggacgccggagtactcgtcgcggatgcgcttgtactggccgaacaggtagccgatctcacgaccaccgacgttgatgtcgccggcgggaacgtcggtgaactggccgatgtggcggctcagctcagtcatgaaggcctggcagaagcgcatgacctcagcgtcggacttgcccttcgggttgaagtcggaaccgcccttgccgccgcccatcggcagcgtggtcagggagttcttgagaatctgctcgaagccaaggaacttgacgacggactcggtcacggtcgggtggaagcgtagtccgcccttgtacgggccaatggcggagttgaactggatacggtagccgcggttcacctgaaccttgccctcgtcgtcaacccaggccacgcggaacttgatggtgcgctccggctcgacgatgcgctccagtacaccggccttctcgtactccgggtgcttctcgacaaccggctgcagggtctcgaagacctcgcgaacggcttgcaggaactccggctgatcgccgtcacgggcaacgacctggtcgtagacacgcttgatgtactcgtcagtgagcatgattctcctcgatttgctagggaattaagacggttttattctatgcgcgcaggcccttgctgcatagagtctcgctcggataacgggaaagctatcggcgtggttatggggtggttcaagtttccgtttgttagatttttcggcgattgctggatgtctgtctgtgcgtgaatcgggtcgaaatggaagctgcatcacaccgaaggtgcgttcatatagtggacataaaggtggacttgggtgatgtcggatgtgcccgttgggaatcgtgcgccgtaggggccgaggtcttcggcgcgcaggttaccgggttcgcggtcagtgcgcgaagtaggtctgcagaatcatcgtggtctcggtgcttaccggcaccgtgcggtggatgagattgagcaattcctcaagggcggtgggggaggccacgcgtaccaccagtacgaagctgggggcgccggccaccgaatagcaggagacgatgccgtcgatattgttcagcttgtccggaatcgaggattcggctgagtagtcgagcggggtcacgttgacgaacgcgctgatgggcaagccgcgctgctcttggtcgatgatggccttgtatcccttgatgatgccgcgcttctccagcttctgcacgcgcgactgggcggcggagacggacagtccggtcgcctgggccagttgcgcgagcgtggcgcggccgtcggcctccagcatggtgaggatgcgctggtcggtctcgtcaatcgcggtcatggtgtcttctccgttcgttgtgctctgtgttcactgtacctgttgccggaatgcgatggctttccgattttgcctggtaatttcagtagttcttcctgtgttttctgttgtgtggtggaatgtttatgcctaaagtcctaattgaatgtaataattccttctgaaataagagaacgacgaaataattccattgaggagggatgatatgcagaagttttccaacatgcctctgtccgaagttgcatctgctgctgtgcctgctgccagacgggttgctgtgccgaccgccaagcccgcgagcttgtccgccgaagccctgaatatcccgcgctccggcatccgagacgtattcgaccgtgtagagcgcgtgcctgacgcgatttcactgaccgtgggggagcccagcgccacggccgcgccgcatatcgtggcggccgcttgcgaggccgcacaggctggccgcactcggtacaccaacgtgctcggcatccccgaataccgcaaggccgtggctgattactccgcccgtgtgaagggactcacttatgatcccgaaaccgagattcaagccgttgacggtgccacgattggcctgtttctggcgctgaaagccgtggtaggcaccggcgatgaagtgattattccctcgccgttcttcacttcctatgacgccgaagtgatgctgtgcggcggccgcccggtcaccgtggcgctgcgtccggagcatggcatgcgcgtgaacgcggcggacatcgaagcggcgatcaccccgcgcacccgcgccgtaatcatcaactcacccggcaatccgaccggcgcggtaacttctgccgctgaactggcgcgtattgccgaagtatgcaagcagcacaatatttgggccatctccgacgaggtttaccatccgttcgtgtttggggaaacgttcggggaaacgcttgggggagaggcagccgtggcaccatcgattgccgcggtgccgggcatgaacgagcgcaccattgtggtggaaagcttgtcgaaaacctacgcgatgaccggctggcgcatcggctacctgctggcacccgaagcggtcatcgaacagaccggtaaaatcgccgaactcatgcactcctcggtgaactccttggcgcaatacgcaggcgtggcagcactggccggtccgcaggatcatgtggccgccatgcgcgaggaataccgcgccaagcgccagatcgtgctggacggtctggccggatgcccggtattgcgcttgattgaaccgcaaggtgcgttctacgcctttgtggacgtacgcctgactggccttgactccggtgaattcgcagaccgtctgctggacgaagagcacgtggccgtggtccccggcgaggccttcggcgaggaggggcgcggcttcgtgcgcctctcctacgccggagatgccggcgagctgcgtgagggcgtcgcccgtctgcgcgcattcgccgaacgggtatggaaccccatcaccggacaccacaccgccacttatcaccccatggaggtgttggcctgaggcttaaagcgaggctaggccgccaattcagactcgtcggcgcgagcgatggcctgctcgtaatccttggtgcccttgaacacttccttggtccacgggttgatgccctgcttcttggcgcgtagcaggatgtagccaagtgccagcacattggccgccaacgcgattagcgagactgcaaggttcacattcggattgttcacggactgggtggagaacacggaatagtcctggaacatcgggaacacctgcgcgaacatgcaccagatggccagcgtgttggcgcggttctgaatccaaccgcccttgttccagaagaagttggccacggtgggtgccagcagcagcgccaggccgcaataccaggcgtgggtgggcaggcagttgtaggtgtagcagaagttccacaggtcgtaggccacgatgaacacccaggtcatgtccggccagagcatgtcgtccttcttcttggaggcgtagatgccgaaccagccggtcatgcagaagatgttgagcaggccggccatgccgttgaagacgttgtgccagccaccgtacaaggtcacgccttcggtggagatccacgtggtgccccagccgcggatggcggattcgaagtcggacactacggcaatgaggatgttgatggccacgatcacgaacgggaagcacttgaaccagtgcgatttgccgatggatccccacttgtatttgagggccatgaaaccgatgcagccgatggtggccgcgtacagcttggcatagtggaaccagctggtcatgtgtacgtaggtcgggttgttgagggcccagtcggcacccatggcggcggccgtgtagatggtgatgaagtagacggtcagcacggccggtacgacgaggaaggcgatgacgccaccggttttggtgcggcgggccagttcgttggcgccgataagacagcagaagacgagtatccatccgatccattggtagatggcgttgtcgccgtagacctgaaacagcataagcggtcctttccgtgtgcgcgctgtgcgcctcgcagtcctccattgggttgctgagacgcctatagacgccgctatgttgacgcagcgtcaatttctctcacggcacagtctagcctcaagttgacatcgcgtcaaaacaaccgtatccgcgcagccgtgactcatgcgatttgtcggtgaccgttgccctcgcggcgttgggctgtattagagtggttagggatatctgacgaatgggagcggaggccatggcgaacaagacggcggcgaatcgcaagcccagcatgggggatgtggctgaggctgtcggtgtttcgaaaaccacgatttcgcggtatctgcacggcgaattcgggtgcatgtcccccgaaaccaaggctcgcatcgaagcggtgatcagcgagctcggttaccggccgaacaagatggcgcaggggctgaaggccaccgtcagccatctggtgggcgtgaccatcgccgacatcggcaacccgttcagctcgctgctgctcaaaggcatccaacaggagtgccgcgcgcgcgacgtccagctgctggtcagcgactccaacaaccaggcatcgttcgaacgcgcgaacatcgaatcgctgctcgacgcccaggtcgacggcctgatcgtcaacaccgtgggcaacaacgacgattggctgtccgaatactgcgctcgccgcaaccacaagcccatggtgatgctggaccgcatcgtgcagccgatcgtctgcgactgcgtggccaccgacaaccacggcgcggtgttcgagatgctcgactatctggtcgatcgcggcttcgactacgtggtgctggtcacgcgccccagcgacggcatctcgaccagaaccatgcgccgcgaggccgtggaacagtatttcctcgaccgcggcctgcgcggtgaagtgctcgtgtatcgcgaggatgcggccgatctggccgactgtctggtctcgacgatcgcggcgcacggtggcgagaggatctgcctgttcgccaacaacgacgaaaccatgcacgatgtgctggaggcgctgcccgcctcgcccgacggccatgtaggggtatgcgcattcgccaacgaacgctgggcaaagtacagcggcattggcatcacctgcctggaccagaatccggtggagatgggccgcgccgccgcccgcgtgctgctggcccgtatctatgacggatacgacggcccgtacgaactcaaggaaatgcccgcgcgattgtgcgcgttcgcctccaccgaggcatagtccaggcgctatccaagcgccggcaaagcaccggcaaggtggcatcgtcaccggccgtaagccgcagtagcggcacgcttctcgtcgcttgatatctctcacgacacgccgtttgttaaccggtacacgtaacgcggtgtatgctctagttaaccgataaacgtaaccgatatactaaatcggtacacgtcaccacataacctgatagaacaccaccacgggccggccgcatacgccggattccggccctagctcaaggaggagcgagctatgatcacatggatcatgggcattttgctcattgcgtcctttgcgtgtttcgtgatctacgcgatgcgcggcggcaatctgaccatcggattcttcatcctgaccatcgtgtggacgctggtctacttcctcggcatcccgttcggagtgggcgaaccgttcgatgtgatcaaggagacgttcgccgaaccggccctgacctacggccccaccatcgtgcagatcgtgtgcggcgcatggttcggccgcgtgctggtcgacacgggcatcgccgcctcgatctcctaccgcactgccaaggtcggcgagaagaacccggtgctggccaccatctgcgtggcattcgtcacctgcctgatcttcaccagcgcctacggcgtcggctcggccatcgccatcggcgtgatcctcttcccgatcatgggccgcctcggcgtgcccaagcgcgtggccgtccccgtcttcaccctgtccatcggcgccgccatgtggatcaacagcgtgatgttcgtgcagttcgccgccttctaccagggctatgaatccccggacggccagaacatcgaatggggcatccactacctgagtttcggcattcccgccatgctcgtccagatggctgccgtcgtcatcttcatcctcatcaacgccaaggccatcgagaacggcaccccgtacgaggtcggcgacccgaacgaacgcccggccagcgtgcccgaagtgccgatctggacctacgtgctgcccgtcgtgccggtggcgctgagcatcgtcttccagtgggattccgtaccggccctgttcctggccgccatcatcgccttcttcggcaccggctacatgaagacctacaagggcttcgtcagcatcctcaactccaccgccaaaaccgccatcggcgacatcggcagcctgatcatcatgctgctcgtgctgcgcttcttccagcacgccgcagtgaccgtcatggccgacttcggcccggcgctcacagccgtggtgccgaacaacgagttcatcctggccctcgccgtgtgcatcctcgcgccgctcgccctgttccgcgggccgctggagctgtacggcgccggctccgccgtgatcagcatcctgatgggcatgggcgtgttcaacagctggttcctgttcgccatgctcgtggtgccctcgatgacttgcatctccagctgtgtgacccagtcctggaacatgtgggccgtggaatacaacgagctcgaacccaagaccttcctcaagaacggcgtgccggtctactggctgtgcaccttcccgatcatgggactggccagcctgctgctgttctgacggcccacctccataccgccgcgcttcacacttcacacctcacgtaaggattctccatgaccaccatcggcatcaacaccctcgtctacatgaccgaactcgccaacggcaccccgcagtccaacctgctgccgattatcgcgagccacggcatcactctggccgaagtccgccgcgaatacatcgcctcggacgccgaattcgacctgatcgcggccgccgcccaggccaacgggctcgacctgttctactccgtacccgaatcgctcaccatcgacggcgcggtgaaccccggtttcgccggcttcctggacgaggcccgccgcatgggcgtcacgaacgtgaagttcaaccagggtgacgtcaaagacgtggccaagtccgtgatcgacgacatcgacgcggccgccgccgcgtacggcgtgaccctgaccatcgaaaacgaccagacccccgaaaacggcacgcttgactgcacggtcgcctccctgcgccacatcaaggaactcggcggcaacatcggctacaccttcgacctgggcaactggttctggcgcggcgagaacgccggcgaggccttcgcccagctgctgcccgccatcaccgtgttccacctgaagaacgtgaacggcgccgccacgcgcgaggagctggccaccaccatgcttgaggatggcgtgatcgactggaagaccatgctcccgcagcttgacgcctcggtcccggtcttcctcgaattcccgattccggccgacggcgtcgccgcgcaggttgcccaggtccgcgaggtggtcggccagaagacccccatcatgtccgaagtcatgaccattggcgagccgatggtgaacctcatcgccgactccgccgaaaccttcatggaagcccgtactctcccgcgcgagatggctggcgccgaattcaacgtcgccatcggcgtgaagcgccagggccactcgatcagctacgtcaccacgctcggcaacgactggcagggcgacctgatcgtcgactacatgaacaacatcgacatcgacaccaccaacatccgccgcgtggacggcgccgccaccggctaccagctcaaggtgcgctccagcgacggcgagccgaaggtcatctacttccgcgccggctcggccgcctcccagaccgcgcccgacatcgtcgacggcatcgacttcgacggcctgaagatcctgcatgtcaccggcatcttctccgcgctcaccgacaacacctacgccaccgtgatgcgcctggtcgacgccgccaaggcgcacggcgtgaccgtgaccttcgacccgaacccgcgccccaccctgtggaacagcgaggagcagatgatcgaggccaccaaccgcatcgccgccaagtgcgacgtgttcatgccgggcctgagcgaaggccagctgttctccggcctgaccgacccgcgcgccatcgccgactactacctcgacatgggcgtcaggcaggtggtcatcaagctcggcgccgagggttccgcactgttcgagcgcgacgagtccggcgcccgccgcgagaccgtggtgccaagctttgaagtcgatgtggtggacacggtcggcgcgggcgacggcttcgcctccggcgtgatcacctcgctgctggaagggctggacgacgagcatctgctggagcgcgcgaacgccgtcggcgccatccaggtgaccagcgtctccgactccgaaggcctgccgaccgccggcgaactcgccgaattcatcgccaacaccccgcgcaaggaggtctcgctgtgaagctgcaggtagccattgaccgcgtggacatcccgcgcgcggaagcaatcatcgaccaagtggccggcgaggcggacatcatcgagatcggcacgtcgctgaccaaggaatacggactgcgcgcgttggccccggtgtgcgagcgactggccgcacgaccggccggcgagaccgggcgcaaggccgtgctgttgggcgacatcaagacctgcgacgaaggcaagtacgagttcgacctcggcttcgactgcggattcgcctacctgaccgtcatgggatcgtcgtcgcttggcacgatggaggtgtgcgccgcgtccgccgccgaccatggcggcgagatgatgatcgacctgctcgaatgcgatgagtcgcgcatcgaactgatctccggcttccccgacgccgtctactgcctgcacacgtcagtcgattcgggcgccaccgccgacccggtgggccaggtgcgcgcgttcaaggcgcgattcccgcagatcacgcgcatcggcatcgccggcggcatcaagcccgaccagctcgccggactggctgcggaaggcgtcgaaatcgccatcatgggctcggccatcaccaaggccggcgacatcgccgcggcctgccgcgcgtgcgccgcggcctgccacagcgcgtgagcgcatcatcggaacgttgtatcaaggaaaggaacatcaatgaccaacgaaaccactgcccccagcggcaccgagtcgcgcatcctcgaccagatcgtcgccgaaatcaccggcgtgatcgccaaaatggatgagggcgatatcgaacgcgcgatgccgctgatcggcaagaccggccgcgtgtacgccaccggcgaaggccgctccggcttccaggcgcgcagctttgccatgcgcatgatgcacatcggctacaccagctacatgatgggcgaaacgatctgcccgtccatgcatgagggcgatgtgctgctcgccatctccggctccggcaccacccgacgcaccgtggaggacgccgaagccgccaagaagctcggcgtgaaggtgatcgccgtgacctccaagccggaatccccgttggctgccgccgcggacgccgtgatcgtggtgcccggccgcgtcaagggcgaggccggcggctccatccagctgctgagctccctgttcgatcagagcgtgcacatcgcgctcgacgccctgtgcctgatgctctcccgccgcgacaacgtctccgacgccgacgccaacgccaaccacgccaacgtggagtgagtggcggggcctgacgccgcaaacgcaaaaacccttggaatcggactgattccaagggttttgttgtgtctgtggagctagccgggttcgaaccggcgaccctctgcttgcaaagcagatgcgctaccagctgcgctatagccccgtgagaaaaaaagagcggctcgcggccgcttcatttttcctgtgggcccgggaggacttgaacctccgacctcatccttatcagggatgcgctctaaccagctgagctacgggcccgatccatacgcttcaaaagcgcacaagtgattacaataccattgaacggcggtatgtcaataacggcgtgtcgtgattgtcgcttgcgccatgattgccggcgcagcggagcatgacgagtgcgatgaggctgttcgcgtggcggaagccgtaggccatgcggatggtgaccttgatcctgttgtcggacgcctcgagcctggcgttggagtagcccagctcgatggtcctgaggatgtcgggccacgacggcggatcttccgggatggcttgccgctctcgtacaactgcacgatctgccgtttgaacgcctcgtcgtagtggcggggatgtttcgggtcggccatcgtcggcctccaatctcatgtcattcgtccctcatcggactgtctaatacgttgtagccaatccacggcgtcacatcgtcaggctgtccgggtcgaggaggaaatcgtagacgctcatcgtgaggatgccgtgctcgtcgcgggcgggtttgaccacgtcgcgtacgaggacgattttctggaagctgtcgtcgatctcgagcagcgaggcttctcctgcgcgaccttctccggtgtgggcagttggtacgcggattggatgtagcagcgccggtcgccgaggttcgccacgaaatcgacctcgaggcgtttgcggtacggcacaccttcgctggtgccgcgccggtcgaccacgcccacatcgacgttgtagccgcgtgttcgcagctcgttgtacacgatgttctccatgatgtgcgtctgctcgatctggcggaaccctagtcgcgcgttgcgcagccccatgtcctcgaaatagtatttcttcgggctgccgatgtacttgcgtcccttgacgtcgaaccgtctcgcctcctcgatgacgaacgcgtcctcgagatggccgatgtattgcatgatggtgttcgtgctgatgccggaatgcagcacgctggcgaacgtggccttgatcttgggcggattggtcagggcgccgatggaggaggccagcacgtcgaccaggtcgtcgagctcctgcgacctgcgcagcccgttgcgcgagacgatgtccttgagataggtctcctcgaacaggttcttcagatagagggacttctgctcgtcgcttctcatggacaaggtgagcggcatgccgccgaacatcacgtattcggcccagccgtgctgggcgtcgccgtcgtacgcctgcatgaactcggcgaacgacagggggcggacgcggacctcgtcgccgcggccgcggaactcggtcatcacgtcggtggacagcatcttcgagttgctgcccgtcacgtacacgtccacgttgcgcatgcgcagcagcccgttgagcaccccgtacagacggggcggctcctcgccgcgcatctcctcgtccgagatcgcgtactgcacctcgtccagcagcacgtagtatggttcctcgcgattcgtgatacgggatctcacatagtcgtacagggcgagcgggtcgcggtagcgctcgtgcatcagatcgtccagcgcgatctcgatgatgtggtcgtcgtccacgccctgcgcgcgcagatggtcctcgaacagatcgaacaggagataggtcttgccgcagcgcctcgcgcccgtgacgaccttgaccatgccgttgcctttgcgcgcgacgagatcgttcaggtacttatccctggagatgcgcatcgtatcctccgatcgatgtcctgttcccatgccgctatcgcgtggatttgacatttatgtcagtttcactcaataggaactcattctattgcgcgattttgacatagataacactttcgctcaataggatgggtgaatcatgggaggacagggcgtgcgcgtgggggcggaggtgagccggtcgagggtgccggccacgacagggggactcgccatcagcatcgcgctggcctcaatcccgttcgcggcgttcgccattggcttgattctcaacgctgcctcgccgcgcgtacgaacgcagttcatgaagaattacgagtgattcgtcgaggtcttcgtcgttacggccgccgcctgagccagggcagcggccacttgttcgttgacggctccctgctgtgcgatggtgacgcggatgcctcgactggcatgcgcgtccacgcccgcaccggcccccgcgtcggctccggtggcgtcggcgctgatacgcaggctcggcaggaacggcttgccggcggccacacggatgccctgttcggccagcagtcgcaacgccgcaggttcgtcgcgcaccggaatccacagattcagcccgtcaccggtatgtacatccaaactttgacgcagcagcagcgcgtgcatcgtcttttgccgggtggcgtagatatgccgggcgttggtcaccgtgtggaacgcctctttgtcggccagcatttcatacagaatctcttgcaggaaccggctcacccatcccgatcccaagcgtcgttgggcgataatcgcctccacggcatcctccggcccagacagcgcagccaagcgcagatccggcccgtgcgacttcgaaaaactgcggatatgcaccacgtgttgcggcaatcgttgcgccaacgatgtcgcatacgcattggccacatcgccactgtgatcgtcttccacaatcagcggcataccaacgccattcgggtagtgcgcgagcagcacgtccgccaaagcgtcgatgcgttgcgggctgaagctggccccggtagggttctgggcgcgcggctgcagcaggatcatactgacctgatggccgccgtgcggcaccgccagacgctgcgattccagcatggtcagcgcacggtcgagtgcgtcgggcagcataccgaacccgtccatcggcacgccgaacgccatcgcgccatgtgcctcgatcatgtcgagaatcagcggatattccggtgcctcggtaatcacaaaatcacccggctgaacaaaagcgttcatggtgtgcgccaaaccgtcgcccgcgccggatgccatagtcatcgcctccggctcatacggccagttgcgtcgcaaaatctgttccagcatgggcaggatggtcggcccgtcgtatgaattgacgaatgccttgtgcgtgccgagcttgccgagaaacgggcggatgtccggcagcagcgaaaggtccggcgtgcccttggacaggtcgataatcggtcggtccggcgcggtggccggggcttcggccagcaagtcgccggcatcgtagcgatgcgtgcgcgactgccgcagtacgaatgttccggcgcgcccgcgggagcgcagtatgccggacctggcgagggcatggtaggcactggagacggtggccggactggtgcgtagcagtcgggcgagatcgcgtacggtgggcatgcgctggccttccgcaagtatgccggaggaggtcagcgaggtgaccgattcgacgatgcgttgcggggtggccgtcgcctcggtggtgaggatgagtgaggataactggccggcatcaacggccaggtcgtcggtggaacgcaggggagcggccgtaatgcttggctcatcgttgtagccgacggcatgtgcggttgttgatgcggttgatggcgatggcgtatccatgatctgcctcccggatcttggcggcgagcgtgatgagcgcgcgtctgcgtgaatgttgccgattgccgccggctgatgatcgatggcggttgccggcttgttgctggctgcttgactgccgatagtaacggtcactgtggcaacggtagtcaaatgttagcgccgcattgtgcaatgagtatgtttttgaataacataaacattacataatctggatacaattattgttcttgttcctatgtttcaaaatgatttcgtattcgccactactgtaacattattaaatgttcgagtttgacgcgaaatgttcaactctcataatgacattcacagcgcgttgctgccctgacccgatccacgggagacggcatcgggcacttcgagaaaatatcgaggaaaggacacatcatggggcatgatctttcgcaggatgcggaaatctgggacgacgcttacaagctggaccgcgcacacgtattccattcgtggcacgcacagcgcaacctggatcccactgaagtggtaaccggtcacggcgtgtggctgaagtacggcgacggccgtgaaatgctcgacttcaccagccagcaggtcaacgtcaacatcggctaccagcacccgaaggtgatcgagggcatcaagaagcaagcggaactcctgtgcaccgtcggacctgactacgcgaacctagcccgtggccgcgccgcctccctggtggcccgccgcgctccggaaggcttcgacaaggtgttcttcaccaacgctggcgccgacgccaatgaaaacgcgatgcgcgccgcccgcctgttcactggccgcgacaagattctgtcttcctaccgctgctaccacggcaacaccggtgcggccatcagcgccaccggtgactggcgccgtaagcccaacgactactctcgcggccacgtgcacttcttcaccccgtacctgtatcgctccgagttctccgcaaccacccaggaagaggagtgcgagcgtgcgctggctcacctcgagcacgtgatccagttcgagggcccggacaccatcgccgccgtgctgctcgaatccgtgccgggcaccgcaggcatcatcattccgcccaaggactacttcaagggcgtgcgcgagatcaccaagaagtacagcatcctgatgatcaccgacgaggtcatggccggcttcggccgcaccggcttctggttcgcactcgacgactacgactacacgccggacatcatctccttcgccaagggctgcaactccggttacgtgcccgccggcggcgtgattatgagcgacccggtggcccaccgcttcgacgacatcgtcttccccggcggcctgacctactccggtcacccgctggccatgggcgccatcgtggccacccaggaagccatggaagaggagcacatcgtcgacaacgcctacaccatcggcaaggacgtgctcggcccgcagctcaccgctctgtacgacaagcacccgaagatcggcgaggttcgcggcaagggcgtgttctgggccgtggaaatggttgccgaccgcaccaccaaggagccgctggacgacgccacgatgaagcagatcgtggccgaaggcgacaagcgcggcctgattctcggcgtgcacaacaaccgcatccacgtcactcctccttgcgtcatctccgccgacgaggcgacccagggcgtcgagatcctcgaccaggtgctgaccgcggccggttgctgattgggtgactcaatggctcggtgacggtttgtagccgttgccgacagcaccgttcattgctgatggcggcccgttcggaacgttaggttccgggcgggccgccatcgttgtccgccgttgtgcgagaatgacttgcgtgccttatcgccgtcgtcaatccaccgctccgaagtccggtgcgccgaaatccgttcggtccgctgccgccgggcagtcgttggacattgacggcatccatctgcacctgacgcgcaaacccatcaaaaacctgtatttgcgcatcaaaccgccgagcggccgcgtcgaaatctctgcaccgatgcggatgagcgagagtcgtatcgcggatttcgtcaaagagcgacattcgtggattctcgcccagcagcagcgcatggctgaggcgcaacggcgctccatcatggcactgaacgagggcgccggcttcgagaacggaggtcgtggtgtagctggtgccagcggccatgatggaggcgttgccggtcgtccgaaaaccggtgatatcagtcgtccgggaattggtgacgccgggccaggccaagccggtacgaatgtccaaccgtattttgaccgctcccaaatctggaccgacgaacgcaaacgacaagcggcggccgcgatcaacgccgcgttgccacagctgctggccaagtgggggccggtcgtcggccggcagcccacgcatatcacgctacgggtcatgacctcgcgctggggatcgtgtacaccgcgaaccggccgcatccgtctgaaccttcaattgggactgatggaaccgcaattcctggaatacgtcttggtccatgagatgacgcatttgtgggaaagcggccacggtgccggattccagcgccgcatgaccgcctacctacccggctggaagacgctgcgccgcgacctcaaccgccgcgtggtgctgtgacgatgacgggtcaggcttcagtgccggcgatgtggctgatggcctgatcggattcgtcgacgatttgccgcatggcggtttcggcaccgtctccgtcgcccttgcgaatcagtgcggcgacttccgtatgccagccgagggccgtctggtcggccacctgcggcatgagttcgtgctgggtgcggccggtcagcgtcgaggcgatcacgtcgcccaatgcggcgaacatcaggttgccggacgcttccagcaacgtgcgatggaagagaatatcggcatcgaggtattcggattcgttcgcatggtccgaatgcgccaccatctcgatggccgcacgggtcagggtggcccaatgctcgggggtggcggattcgcctactgacaaggcttccgagacggccggccgccctgacggtgtgaagaccgaaccccgcgccatcgtgttccacccccgaaaaaatgaacaggtagacatgcgcgacctgatgatctaccaacaagtacggcgcatcgatgaactcgaacggcgcatcagcgaacttcagttggagctgaagcagtgtgaatgccagcaagggcgaaccgatcggtccaaacgggctactcaggtcgaccagcccagccagtccgttcagaccgacctaactgatcagagcgggccctctgaccagtccgaaccatctgaccgaccttgtacttgttgactaagtgtgcggcccgcatgtgggcctgccactcgttgttgaacgtacggctacatttttacaaccacagaaatacggttccagtcacgttttccaaccataagatgcgggtttggctacgttttccaacctcaaaatggggagttttatacacttttccaacttatgcatgtggagactctctatttcacgtgagacaaacgtggctcccctctttgaggagagctgtcaacgaagttgactgaggggagtattactccagcgcggagaactcccctcagtcgtctacgacgacagctcccctcagagaggggagccaaggaatacggcttttacttatgccaggtgagagcgcatgaaccactggaacttttcgagttcctgcacgtggtcctggatgatgttggagctgatcacatccagctcgtccagctcggcgatggccttgcggtcgtcggcgatgaaggcgtcgtagtactcgatcagcgccttgaggtactcctcggtgcccacgcggccctcggcgtcgaacgacttccacgtgcggttgcgcacgatggcgtcagcacggccatccggggtgccgcccagagtggcaatgcgctcggcggtctcgtcggcctgggccagcacggcctcgacctcggggtcaagcatctcgtgaacggcgatgaagttcgggccggtcacgttccagtgtgcgtgcttcaggaccagagcagcctcctgctcctggctcagtcggttctgcaggatggcgatggccttctcactggccgcttcatcaaggcccggcacaacaaatgcaagtgtcataatgttccttctttcagtaggtggaacgttgccctttcattctacgttttttggttttgccccgggccgaacgaatgggtggtgaatatcacgtggctagttggcatcgtcgttttgtgattcggccggcagtggcgcatggtccggggcgccggctttgcggacttcgatggtttcgatgcggcggccatccaccttggtgacgaccatgttgtagccgtcgtcggaatgcagcacgtcgcctaccgctcccatcttgccggtcttggacaggaagtatccggcgaccgtctcgtacgggccgtcctccagctcgatgccggtcagatcggcgaagtcctcaatggtcatgctggcctcgatcgtggccacgccattgacgaacgctgtacgggtggtgcgttcgccgcccttctcgctgggcagatcgtactcatcgcgaatatcgcccacaagctcctcggtcatatcctcaagcgtcacgatgccgtccgtgccgccgtactcgtcgatgaccacggccagatggatgccgcgcttacgcagcagttccaggcttggcagcagcttggaggtgccgggcagggagatgccttcgcgcaccacatcgcgcacgatcttggcgttcggatcgcgcacgtccagcagatcgcgcacatgcacgaagccgatcacgtcgtcgaaatccttgccggtcaccgggtagcgggagtacggctgatcgcgtacgaacgcggcggcctcggccaagggctggtcgccctcgatgaagaccacgtcggcacgtgggcgcatcacctcggcgacgatggtttcggacgcatcgaacacatcgtccagaatcgtgcgttcgtccttggagaggttggtgttggagctgaccagcacgcgcagctcgtcgtcggacacctcggactcggtctgctgcgggtcgaagccgagcaggcggacgatgccgttcgtgttcttgccgatgagccagatgatcgggcggcagacggcggcgaaggcgtcgatggcgggcaccacggcgcgcgcgatctgctcggtgcgctgcatggcgatgcgcttgggcaccatctcggagatcacgatggaacagtaggagatgatgagggtcaggatgatgttcaccaggccgccggcgatgccggggtgcacgccccagctttcgaccgccggaatcaggtagggggcgatggaagaggcgccgaacgaggcggacaggaagccggagagcgtcacaccgatctgcacggtggagaggaaggtgttcgggtcacgtgcgattttggcgactttggcgccgcgagcgtccacctgctccatttgttcgatttgcgagcctcgcagggagaccaacgccaactcggtgccggagaacacggaaccgataaccagaaatacgaaaatcaggaggatgttcaaaccaagtgacatgcctccaactctaggggagtggcacgtcaaattgggattaggagggtgactatgcgcagcgtcgcaattcggaatacgctcattaggtcaattgtgtgtttattaggtcactagttggcagtgccgggtattgaaatggcggcatttcaatacccggcaccggtgcttgccgacctaatgaacgtgcaatcgacctaatgaacgggaaaatatttcggaggtttcggtttgccttagaagctcagcacttccactttaccggagtcgagctggtagcgggcgccgacaatcatgagcttgtcggcggcgagagcctgctggataacgggggactgctccaccagagtctcgatggtatgggccacgtgtacgcgctcaatatcctcgtgctcctcaagttccgcctcgcgcgcttgccacacggacatgccggcctggcgtaggataatcgactcggcggtggcgatgtgctcgtcgaggtcgtccatcgcatcggcggcctccaacgagccatctgcctcggaggtgatggtgtgcatgaggtcatcaagttcctgcgtggcggcttcaagcgcgccacaatgctcatggccgagcacgcagatcaggctgacgtgcagtttcttgaccgcgtattccagtgaggcgataaccacatcatcaatcatctgaccggcagtgcgcacagtgaacagatcacccaggccctgatcgaagatgatttccggaggcacgcgcgaatccgagcaggccagcacggccacatccggattctggccgtctagcaacgtttgacgggtttccttgtcctgccatggatagtccggcttgccttcggcgaatcggcgattgccttggagcatacggctccacgtcgcatttgcggtcgattcctgttcaacgtctgcctgagccatgaaaacctccattatcagcggactgctggtacccatagtagcgattggaagtgcggattcgcgactgcatgcataatctggctttgcccaaagcataatgagaacgttcacaatctcaatcctgtttaagggtgggccgtgatgatagtcagcacaagggctgtagctggtgtgataaggctcatatgttctgtccatgcgagccctgtgccgccacattatgatgggttctggtaatcgcttgaagaatcctgaaaggaccgaaaatgactcttctgcagcatgaactgaccgatttcaaggtgaacgcattccagaacaacgagttccatgaggtgaccaaggacgatgtgctcggccactggtccctgttcttcttctacccggctgacttcacgttcgtgtgccccaccgagcttgaggacttggccaagaactacgccaagttcaaggaaatcggctgtgaggtctactccgtttcctgtgacactcacttcgtgcacaaggcttggcacgacgccaacgagaagatcgccaagatcgagtacccgatgcttgccgacccgaccgccctgctggccaaggatctcgacacctacaacgaggccgatggcgtggctgagcgtggcgacttcatcgtgagcccggagggcaaggtcgtggcctacgaggtcatctcctccaacgtgggccgcaacgccgaggagctgctgcgccgcgtgcaggcctcccagttcgtctacgagcacggcgaccaggtctgccccgccaactggacccctggcgaggaaaccatcgagcccagcctcgacctcgtcggccagctgtgatcgacactgaataggcggtaatcttggcccccctttctgaggggagctgtcgctgaaagcgactggggggagtgctcgcgagagctagcctgatccgatatgctcccctcagtctcactacgacagctcccctcagagaggggagccagtgtatgtaagggagttttcatgactcagaccaacaatctctatgacgtcgtcgtcattggtggcgggccggctggcctgacggccggcctgtacttggcccgcgctcgctaccgtgtgctgattcttgaaaaagatgatttcggcggccagatcaccatcaccaacgaagtcgtcaactatccgggcgtgggccgcaccacgggccgcgcgctcacccagaccatgcgtcagcaggctcaggactttggtgccgaattcctctccgccgaagccaccggtctcgacgtggatggtgacatcaaaaccgtgcacacctcacgcggcgacctcaagacgttcggcatcctcatcgccaccggcgccagcccgcgcaagctgggcttcgagggcgaggccgagtacgccggccgcggcgtggcctactgcgccacctgcgacggcgagttcttcaccggcaaggaagtactggtggtcggcggcggattcgccgcagccgaggaatccgtgttcctgaccaaatacgcctccaaagtcaccgtgctcgtgcgcgaaccggacttcacctgcgatgccgcagtggccgccgaagccaagaacaacccgaagatcgacgtgcgttatcaggttgagctgaagggcgtcaccgccggccaaggaggcctgcgagaagcctcaatcctgaaccttgccaccggccagaccgaaacgtggaagcccgccgacgccggcaccttcggcgtcttcgtgttcgccggctatgtgcccgccaccgatctggtgcgcggcgtggtggagctcgacgaccacggttacgtggtcacgcacgactacctcagaacctcggtgccgggcgtgtacgcggccggcgatctgcgcgtcaagaacctgcgccaggtggtcaccgccaccgccgacggtgcgattgccgccgtggaactggagcgttatgccaagcagatgagcgagaaaactggcttggtgccgccgcgtcccactgcttccgcttatgaggagtccgaggccaaggccgcctccgccgcctcggccgctggcacgacgcccgccccggctcccgccaaacgcagcgccgatgccggccgcagccagcgccgccaagaagtccggcgaactgttttccgccgccatcaagcagcagcttggcgtggtcttcggacgcatgacccgcccggtcacgctcgctctcgagctggacggcactccgctttcggcggaattgcagggtttcatcggcgagatggttgcgctgtccggcggcaagctgaactcggttgccgttgatgccgcagggctgatcacggcggtggatggtgcttctgtgcctacttctttggtggttggcgagccattggccgtcactttgccggacggtgccgaactgcccacttatggttcgttggacgattccggccgtgccacgttcgacgtcgccggcgtcctgccgctcgcccgcccaactgtgcgcatctgcgtgccggctgagggcgacggcaaggctggcaaggacggcaatggttcactggtcttcaccggtctggccttccacggcgtaccttccggccatgagttcaactcgttcgtgctcggcctgtacaacgcggccggtcccggccagccgctgggcgacgacctgatcgaacgcgcgaagtccatcacggacccgctgaacatcatgatcctcgtctcgctcacctgcacgatgtgtccggaaaccgtgcttgcttcccagcgcattgcctccctgagcccggccgtgcgcgccgaagcctacgacgtctcgcacttccccgaactcaaggaccagtacggcgcgatgagcgtgccctgcatcgtcatcacccacgccgacggcacccagcaagtcgaattcggcaaaaagagcatcccccaaatgctcgaactggtcggcgcgtaagccgcacgacctcaggtactcaacagcaacaacaacgattctgccaaaatcgtgacgtacatcgattgatgcgatcgatgcgcccgactccggcagaatcgttgttttgctgcagctcagcctcggtcttcgacggccttcatgacgtttctgtcgccgaggtacttgaccaggctgatgctgatcagggccacaacgaacaggccggtgagcaccgggatgagtgcggcgtagcggtgggcctgatcaggcgcgtgggcaactacgaacgaggccaactggttgccggacagaccggcgaacgcccaggcgctcagcgtcagaccgtgcgtggtggagacggttttggtgccgaagtgctgatcaagcagcacgggcagcgtcgagaaaccgccaccatagcccgcgttgacgaggaacagcatggccagcacggcccacagcagagcgttgtcgatgctgttggtgaagatctgcagcaagcacacggcaatcgacatgatgaagattacctgatagacggtctcgcggcgcttcaggtggtcggagagtgtggagaagcccacgcggccagccgtgttgaacacggagtccacggcgagcaccagtccgatgatgccggagatggcggcggcaaacttggcggggctcaggttggcatactgcgggaaggccctgagcacatcgtgcaggatgtccttctcttggctgatgagggccaggccgcaggtgatgttgatatagaaggctatccagatgccccagaacacgggcttcttgaggattgtcttgcggctgacgtgtgaggtcgcgggatcgtacacccagccggccggacgcttgatgagcaggaagccgacgaacatcatcaccgcgtagaccgcggcgaggatgaagaacatgctgaccaggccaaccgtgccgatgagatattccatcagtgggctggcaatggccttggccaggccgaagccggcgacggcgatgccggtggcgaggcccttgttgtcggcgaaccaaagcatcaggttcttgaccggagtcagataaccgacgcccaggccgatgcccatgatcgcgccataacagatgaacacgcccggcaggaagttcagggcgatgctcacgcccgtgccggcgaagccgaccacgaagcagaccatggagacgagtgcggatttcttgatgtttttctccaccattggcccggcaaacgcggcggacatgccgaggaagaagatggcgagtgagaagccccattccacggaggcggggctggcatggagacggtcagcgataagctgcttgaacacgctccagcaatagacggtaccgattgggatatgaatcagcagtgcgggaataatcgcgctggtccaacgattctcggtaaaccttgccatatatggacggatcctttcgtaactggtgtacgatgacctgccgacccgaacgagagtcgtatcgcccatatccacgcacatcacgacggcatgcccctgtgaaccatccgggctgcacgaatcgaatcaaatcgaatcgtgcgaactgcgaacaattcgctaaacatccttggtgtgcatttcatcggcgctgctggctcttgtcgacgccgacaaacagaactataacgctgttatggggttgctgtggctggtttctgtggtcggaagctatgagctttctcacatcgaaaacagttatatgacggtatcggcgtgattgatacgtgacgtctgcccgtggacgcggcatatccctctcggaaaacaatgactccgtcatgtccatttcttggtttgacatgttttcgtttgcagcgtcggtgctcaccacggtgaccgcggcgttcgagtcgccgggcagggcctcgaccgagggtctcatcctcggctgagatgtgggcggtactatggattcttatcgataaggttcgtgatatgcggagatggtaacgatggtgaccttaaaggatgtcggcgaactggccggagtgaccgccaccaccgcctccgcggccctgcgaggcaaggattacgtcaagcccgaaaccacgcaacgcgtgtgtgacgccgcccgcaaactcggctacaaaatcaacctgtctggccggtccctgcgttctgggcggtccgataccatcaccttccttacctcgggcctcgagggcgactatttctcccatctggccatgtgtgtggctgaggaagtgcacaagcgcgactcgcacatgctcatcgaactgtcccggtatcttaccgacgacaacgatctgtcgtacacgttttcggacggcatcatcgccatcaatgcgccacgtgcggtcgatatcctgaagcggcacccggccgtcatgctggaaaactacgacaccagcctgcccatcgacaccgtgaacgcgccgagcgacgccggctcacgggcggcaatcgaacaccttatcgcgcgtggctgtgcgcgcatcggcatcgtcggcgacaatcacgatcccaacaatcccaacatcattcccggctcgcgtgatattcgtatgcgggccgccaaggagacgattctcgcggccggactgccgtttgacgagcgccgtgatttcatcaaatcctcgtggtcgattgacggcggtatcgaggccgggcgcggcttggccaagaaaggcaagtgcaagtacgacggtctgtactgcctgaacgacggtattgcgctcggtattctgcgtggtctggcggacgatggcgtaagtgtgccgggcgatgtgcgcgttatcggcttcgacggcctgagccagagcatgtacagcgtgccgactttgaccaccgtggccaccgatttcaagggcatggcggataccgcgctgaccttgcttatgcggcgtatcgagaacctggacgacgagttcttcccgcagaccgtgaatgtgggctataagctcatcgagcgcgaatccactgcggcgtagagtctttggccgtgttgagcttcaattgggtgattggactggcaccagcggctgatatcagatatgccgaaagcagcgatgatcggatttaagttgctggagatgacaggatggattgctctttacccctttcaccatcttgcaataattcttacatgtaagaactctctgttaacatgtaagaattattgcaagatggtgaaaggggatgctcatgttgccggccaaagaaagtttgacggttgagttcaagagtgagcagaagcgtcctcaatcgcatgatgaaattgttgacaccgtagtggctctagccaataccgaaggcggcacactgtatctcggtattgaagacgatggcactgtgaccggcgtatgtgacgagcatcgcaatatcaatggacttgcggtactaattttcaataagactgttccgcagcttcccgctcgcgtggcgctcttgtatgagaacgaggtgccgatagtcagtattgaggtggataacagtcagcaaatcgtatctaccagtcaggggaagacattgcagcgccggctgaaagcagacggctcgcctgaggtcgttccgctgtttgtttcccaattcattagccgtttatctcagcaacggttctacgatttcagcgcgcaacctgcaccagaggctcggttggacgatttgaatccagactcacggaacaagttgagaagccatattcgcagtgccaatgcgcaaaactcgttgttgtcttttactgatgaggatttcgatcgggcacttgagctggttgttgatggcccgtatggattgcagccatctgttgctggtctgctcaccattggttcggttgatgctattcatcgatcggttccagccgcatcggctgtttttcaagtgatgaaaggcatgtctccaaaggtcaatatggatccgttcgtgttgcctttggtggatatgtttgatcgtgtaggcgagctgatggagccatggaatcccagccacgaagtcatgagcggcttgattcgtgtcgatctgccagacttcgatcgaggggcattccgtgaggcaatgattaacgctttttgccatcgcgattatgcacgaatgggttcggtgaggttcctggttgatgatgatgggttgaccatagccaaccccggaggattcatagagggtgtctccgaagataacctgcttactgcacaaccgcgttcccgcaatccgcagcttgccctgattctgaaagctgccggatatgttgaacgcaccggacgaggcgtggataccatctatgccgggtcgattgcggcgggtggttctttcccggattattcacagtccagtgctgaggaagttatcttgttcttgcgccgcgtggtacctgacgaggcattcgtaaccatgattggcgacgaggaacgtcgacgtggggctccattgccggtctggtcactgattgtgctctcgctgctgcgtgagcatcgtaggcttaccgtggtccaattgtgcgatttttctcatttggagcatcgacgcatcgtgtccgctgttgagaatctggtggaagctggtttggtagagggggtcggtagcgggagctctcgttcgtatatgctgagtgcccgagtgtacaaacgttcagaggggctggcgtcttacgtgcgccagcgtgacatcgatgccacccggcgcagtggccttgttctggagttcgccgaaaaaaatgatggtgtcgtcactacggcggatgtcatggatttgtttggcctgagctatatcagtgcataccggttgttgaagaagctagaggatgcgggcaagttgcgccgcgaggggaatgggccgtcatcccgatacgtgttgggatgattggcgcgcgtgaaagtaagttctttcatcacctttcaataattctttcatgtaagaactctctgtttacatgtaagaattattgcaagatgatgaaagatgcacacgaacggggaagccccgctcgatgtgagcggggcttccccatatgcgctggtgtgtagatcagcctgtgttctgcaggccggcagcaacacctgaaatggtgcagaggatcagatagatgaatcctgcctgctggctttgcgtgttttgcttcaatttttcttaagcagagtgagacccatcgtatcgttcgattctacgacgaacgttttgcatcaagcgcagataatgtggtgagtgcatattcaacaatggcgataacgtccgaattcctgcgcactttcggttttgttcttcgttgagatgttgaagcgggcatggcccgcgtcctgtgtacgattttcagtcgccaaacaaagaatcgcaattggaaagcaggacgcgcagccatgcccgacagcaacatcatacagatcgaccagaacctgttcgagaccaaactcgaccggctggtcaccgagaagatgacccagatcctcaacgccatgctcgacgccgaggccgacgagatcaccggggccgccagatacgaacgcaaggaggggcgcaaggcgtacagggccggccactacgaacgcacgctcacggcaaaggcgggcaggctcgagctcagggtgccgaaactcaagggcgcggtcttcgaatccgcggtcatcgaacgctaccgcaggcgggagtccagcgtcgaggaggcgttgatggagatgtacctggcgggagtgagcacccgtcaggtcgacgacatcagcaaactgctgtggggtgacaggatgccatcccagaccctttccgacaagctcaagcgcgtgtatgacgacatcgaccgatggcgcacccggccattggaatccgaatacccgtacgtgttcatggacggcgtgtggcacaagcgctcctggggcggaagcgtggagaacgtcagcgtcctcgtcgccatcggcgtcaacgcggagggccaccgcgaggtcatcggcgtgacggagggcatgagggaggacgctgccagctgggagcagttcatacgaagcatgatcgaacgcggtttgaagggcgtgcgcctcgtggtcggcgaccggtgcgcgggactcgtctccacggtgaactcgatgcttccccgggcgaagtaccagcggtgcatggtgcacttcatgcgcaacgtgctctcgaaggtgccgcccaaccaccgggattgggcgtccgcggccctgaaggcgatattcgccatggagtcccgcgaatccgccctcgccaaggccgggacggtcgccgcggagatggagtccaggaagctcaaggcggcggccggctgcctgcgcgagggcatcggggagacgaccgcctaccttttgccggaattcccgacggagcaccgcaggaggatccgcacgaacaacatgatcgaacggctgaaccgggagatccggcgtcgcacgcgcgtcgtcggcagtttcccggacggcaacagcgcgttgatgctcatctgcgccagaatcaggtacgtcaccgcgaacgaatggagcacgcgccgctacctcgacatgtcccggctcgatgacaacctgcaggaagcgaactgatcatcgtcccatggacgggcacgaccctaagtgcgcaaaccttcgggcactaccacaatggcggacggtcttgatgcacttggtttgacaaatattggaatgagcgaaagcatcctaaaaaaggctgccggtacagacaagcttcctgataagcaggaagctgaagtgagtgctcgggcgttcgctgcattcattgatcagccaagacggtagctcgcataatgcattatgtgtgggcagatgtgtcgtctgcccacacattcgctgttgtgctttcgatttggaattcctctgccagatacggggaaacttctaaaaggccgctatgccgaggaagagtcctgtaataccggtggccatcaatacgatgatggtgatgattccggcgaagatgcgtacaggaagggtttcttttccatggtttgatgggctgtccgcaactaatctcattactccagctgtaacccagcaaactgcgcccaggactagtgccaggaattctcgacaccattccgtttcaagtgcgggaatgccgacgattgatgacgggtcgcttgccagtcttggcggaatagcgcataggatacgctccaatatcaggtaaggggtatcaaaatggatcagagtcaaagcgaatgggagctgtagcgccagtcctatccaccacagcgtgcgtcggatggtcgcgagtctgtcgcccggcctagtgtccggcttgccgccttcgccctccgtcccggcaccgtccgcgggcgtgtggtccccctcgtgcgcgtccgtcgtcccgtccgtgtccctttccgcgtccatatgtccccctccgatcatccgagtctgtcgctcggcccgcgcgcccgttccgtgcgcgccgtcgccggccagtctagggccgtgcgacgcgaacggggaggcccgcgccgtcaatcggcacggaacctccccgttcatcaagcggtcggacagccgcggatcagcccgtgttccgcaggccggcggcgacacccgagcaggagtgtcacaaagcccctgccgctctgggtacccaggtggcggtttatgaggacagcatcggtcaactcatcctgcaatggctccgcaaacctacgtactggtcggaaggtagttccggcacgcaggcactatggcatgcatacacaccggagccggttactcccagcgaattggccttgtcgcgtcaggcatgcggtgtcgcatgtgatgcacagcctgtcatcaaaggcacgctgcccaatcgggacatcgcccatatggctgccacatccttgggatacttgacatggggcgttacgaacgatccaatggactatggtctcggtgatctgggcggatgggctctggatttgctgcagatctggggaagctacctggcgaatgccccggaagaggacctggcgtcacggctgcacactcatctcggcgagcaagacgcccgtatgggattcagttacagcgatgttctcgcggactgcgatgcatggttgctggcgcggtccatgcagagcaattcctccgaaaggtctttgtccaccgctttgcgggacacgttcgcgcaaagcgagacgaatcgaattaaacggttctatcagtcccggttcaagggaagtgcggacaacctggtcatcgcatttcgaaagctcgttgatggaatcgatcttggaatattcgataacgtatccggaagtaaaaaagcactgctcattgcgtcacatgcagaccgactcccgagtcaagcggaggctggtatattagcattatcctatgctgaatctcttgaaaatccgaaccgttaatcaatcatgattgtgatcgcattgcgtggaatgattcagccattccacgcaatgcgcctctggtaaaacgtcatagagtcattagagcggaaagtagtgttatcacaagaacgggaaagaccatgaccagcacgagaaacgatatgattcccacaaggacatgcgaggcggaagaggaatgatcacgaagttccggatatacagatcgcatatatgaacgcacgccaaagatgacaagcgccgcaatccagcagactacccccataatcaatactaaggtaagtctacgtacatactcagttgccgtagttaaattcatgcacgaagaggaagagaacgttaagactctgcagattatagtatcatcatcgccattggcgccccattccgcccacaaaataagtgctggtgaaagcagcagtaatcccagccaccatagcacgcgtctggccttgcccaaagccacatagcatctactcgccttagggaatttggtagctgctttcggtgccaaagcacatctctcgccggaaaaactttctgacatatcttctgtgccgtgtttcttcccaatgccatcggttgtagccggattcgctttgcaagcgtggcgttcgttcccggcgtcgccccccgccttgatgccgtccgtggacccggtgttcccgcgcccgtccgccggcttgcccatgtcccctccgatcatccgagtctgtcgctcggcccgcgcgtccgttctccgcgcgcccgcccggcgtgcgccgtcgccggccagtctagggccgtatgacgcgagcggggaggcccgcgccgtcaatcggcacggaacctccccgctcacttttgtcgatcggtcggccggaaatcagcccgtgttctgcaggcccgcggcgacgccggagacggtgcacaggatgagatagatgaatccggcctgctggctttgcgagagctcttccttgtccaccttcttgcgcagcgacttgagcgccagcacctgggtgacggacagcgcgtccacgtatggggagcggatgcggatggcctggccgagcacgtgacggtgctgcagcggccacttgtcgcccacgatggccagaacccacttgcgggtgagctccatctcgttgagcaccttctcattgaggtcctcgcggtcgccgagggcaaggtacatcctggcgatgcgctcgtccgtcttggcgatggacatctcgatgttgtcgatgaaggtggagaacagcggccattcctcgtaagcctgacgcatggtctccagatcgccgaacttctcgcatgcggtgccgagaccgtaccaggcggccaggttgatgcgggcctgagcccaggagaagatccacggaatcgtgcgcaggtcgtcgagcgacttggcgccgaggccacgcttggccgggcgggagccgatcggcagcaggccgatttcggtcagcggcgtaacgatcgagaaccacggggcaaagccgtcggtgttcaacaggtcgaggaagcggttgtgcgcggcctcgtcgagctgagcagccatgtcggcatacttctcggtcatctcggtgttgcgcttctccacgctcggcgcggactgcagcaaggtcgccgcagccacggattcgacgtggcggatggccagcaccgggttgccgtaacgggcgaagatgacctcgccctgctcggtgagcttgaagcggcacttgacggaaccgaccggctgggcgagcaccgcgcggttggcggggccgccgccacgaccgacggcgccgccgcggccatggaacagggtcaggtcgatgtcgtgcgactcagcccatttggcgatgcgctcctgagcggagtgcagggccagcgtggcggaggtcgggccggcgtccttcgaggagtcggagtaaccgagcatgacctcgagcttgttgccggtggccttcagacgagcctgaacctcggggatcttgatcatttcctcgagcacgtccaccgagttctgcagatcctcaagctgctcgaacagcgggatcacgtcgatggtgggcacgtcctccgggtgggagaaggccaagcggttgagctcgtagacatccttgatgttctgggcgctcttggtgaaggagatgatgtagcggcgggcggccttgaggccgttgcgcttctggatggcgccgagggcgcggaaggtgtcgagcacctcgtgcgtcatcggctgcagttcgccgcgctcgccgtgcaggccgtgctcgcggatatccgcaagggcgcgggcgtgcaccacggagtgctgacggaactccatctccaccatgtggaagccgaaggtctcggtctgccagatcagatcctgcagcgggccgtaagcggaacgcttggcgccggcggcggccagcgaacgctggaccaccttgaggtcggcgaggaagttgtcgcaggagtggtacatgaggtcggcgtcgcgttcgatggtgtagtgcagacggtcggccatcaccagcatgaccgcgcggtgcatctccttggtggagatcagggcggccttgtcggtcagacgctcgctcatttccttctggtggctccagaggttcttgagctcggcgctcggcagcgtggtctcggcttccatcgtgaggttgcggcccacggtgcgggtggcttgctcaagggcggcgatcacgtgatcggagaacttgcgggccacggcgcggctcaccttggcggtgacgttcgggttgccgtcgcggtcggagccgatccagctgcccgggtggaagaacgcggggcaagcgggctcgacgagaccggccttatcgcccaggacccagtcgtcgaagcgacggtaaaccttggggatggtgttgaacagcgtgttgtcgaagatgtcgagaattgtgtccgcttcctcaaccggggtcggcttcttcagcgcgattggagaagtgcggaacagggcgtcgatttcgttgtagagacggcgcaggcattccttcttatccgagccgccgaggcgcttgtactcctcaagcaattcggaaacgcggcgaatcttgccttccacggccttacgacgggcctcagtggggtgcgccgtgaagacggggtggaattcgagctggttgagcagttccttggccttggccgggccagtctcattgatgagctggtggtaagcgacggtgagctcgttgatcgggtcgaccgcctggtcaacgggcacgttgttctcgcgctcgtggagcacggaaacgcggtagttctcctcggacaggtttgccagatggaaatacgtggcgaacgcgcgggccagcagctgggcgtcgtgcaacgtcatgttgtcgatgacgttcacggcctccttcaggccatcctggtcggggttcggatccttcagctcggcgaaatgctcggcgctggcctccaccgcgtaatgacgcacggtgtcgaacgtagacagcagttcggggttgtattcgcccagtacgttacgcaggatctcaagacacagatccatgtcgtacttcaggctttcgggaagatcatgctcctccgggccctttcggccggtcccggtagtgacgatggcggcgtcagcgggagtgatctgttcttcaggtgttgccatataacctcctttgccgaataacaggttgctcggtctactggtcgtctgcggctcctccgcagttgttgagaccagtcgttgcgagcccacagcccatattcaacgtggttgttgtgtgggcaatagtgtatccccgcgaaatcgctttttacgttacgaagtccatatagtgcgccaagttgtccacctatagagaccgaatatcggacagcatatgagacactgtccgattcgcggaagatttgagtaccttacgattgctggcggggaaggcagggagtagtaatgaaggatgtgagcgaacagaagaaaaaaagtgcgcccgaagcgaaaggcgcaacggctgtacgtaaattccacacccactccattccgctggacatggaagatattgcacgcgattgggaaaaaccggtggtggacgccggtatcgccgccaaagccagcgtgattgtacgagtcggcatgttggacctgggagccggcaccggctccttccgcgtgcgtgaaatgatgcaccgcatcgcctacccgctgggcgtgcacgtacgcgccgacgtgaacctgacggatatcgaggccacctgcacggatggtcgtaaccgcatcaccgaagtcgtggatttgccgagtaccggcgtgaacaccgaacgtatctggctgctggaacatttcgccgactggttctccgtgaatctcggcaaggggtcgatgtatcacgtcgattcgcaactgtccgatggcgtggtcaagcatttggacgaacgtgacgcttcgcagtattcggccgatctggccaagcgcctgcgcgaacgtgccaaggtcgaggctgaggcggccaacggcagcgtggacgaggcgctggatcttgcgtcgaaaaccaaggtactcgtgacctccgtggccaagtccttggacgatgacaatgaagaagcccaccgacttttggcggacagcgcggaagtcactccggtcgaagacaaagcggccgaagagaaggcctacgacgatgccgaagtgtttaccggtgactccaatgagtcggttgaatcggcgaacgcggcgaacggcgcaaccgccgaaagccctgctgcaagcagtacgaagcgtaagaatcgcgtgcccaaggaatacgccgaacacttcaacgagcgctccgacgaagagaaggccaagggcggtatcaccgtgcggcaggcgcacgagcgactcgatctgattgagcgccgtaagccgctgtacaagccgtggttctccggtctggcctccgccctagcctgcgcggccttcgtgttcctgctcggcggcggcccatacgacatgatcggtgcgttcgtgggcgcgggccttggccagtggatgcgtcgccggctgtttgcataccatctgaaccagttcttcgtcacctttgtgtgtgtggccgcggcggcgctcgcctgcaccggcaccctgcgactcatcggcattttcgacccagtcgcgctctcgcacgatacggcctacatcggcgccatgctgttcgtgatccccggtttcccgctcatcaccggcggactcgacatggcgaaaatcgacttcccctcgggcatccagcgcgtggcgtacgtgctgtgcatcatcctgatggccacgctggcaggctgggccgtggccgtgatggtgcacctgcacccggaaggctttgagccactggggcttgacccgtgggtcaacggattgctgcgattcgtggcggcgttcgtcggcgtgtggggcttctccgtgctgttcaattcgccgcagcgcatgtgcctgaccgccgccctgatcggtgcgatcacggacacgctgcgcttggaattgcaagacttcaacgtggcacccgagatggctaccttcatcggcgcgtttctggcgggcattctggcatcggtgtggcgttcatccgtgcgacgtggctggctaccgccgcacctcggctacccgcgcatctgcctgaccgtgccgtcgatcgtgatcatggtgcccggtctgtatatgtatcgtgccatgtggtacctcggcagcttccagaccatgaatgcgctggactgggcgttccgtgcgttcatggtgattatctgtctgccgatcggcttggcgatggcccgcgtggtgaccgacaagtcctggcgctacgacatctgaccgtcatcttggctctcctcaggtggggggagttcggataaaacagcgtctcagtatggaaacggtggaaggtgcttgagcccttgtatccactaccatcaggcgaagtgcgttgcggccgtattcacggctgtgacggtctgtatgacgccgctccggcgtcaatcgcatatcagcacatagttctgccatggcggtagccgcttggcgtcatgattgaggaggggcgcagttggccaacgatttctggattctgctggccatggtcatctattttgcggccatgctgtccatcggattcatctactccaaacgctccaactcctcctccaaggaatactttgcgggcgggcgcggcgtggggccgtggctcacggccctgagcgccgaagcctccgacatgagcggctggctgctgatgggcctgccgggcctggcctacttcactggtgcgtccgacccgatgtggaccgccgtcggactggcgctcggcacctatctcaactggaagcttgtggcccggcgactgcgccgctactcggtagtgaccgacgatgccatcaccattcctgacttcttcgccaagcgtttccatgacaagaagggcgtgatctccaccatcgcggccgtgatcatcctggtgttcttcagcgtgtacgtgggcagctgcttcgtgaccgtgggcaagctgttcgccacgttgttcggtttcgactaccacgtcatgatgatcatcggcgcggtggtcgtgttcgtctacaccgtggtgggcggctacttgtcggtggtgatgaccgacttcattcaaggcatgctcatgttcttcgcgctcgcggtggtgttcatcggcaccgtggccagcgcgggcggtgtcgacaacaccgtggaattcctgcgtgccatccccggctacctgtccggcacgcaggtggccgcgcccaagctggacccggccaccggccagcagctcgtcgaggcgggcaagaccgtgttcggcgcgccctccgactacggcatcatcaccatcatctccatgctggcgtggggcctgggttacttcggtatgccgcaggtgctggtgcgcttcctgtccatccgcagcgtggaagaagtgcgcaagtcccgaatcatcgccacctcctggtgcgtgatttcgctgggttgcgcagtgtgcatcggcttggtggggcgtgcgatgatgcccaccgaactgctgacctccaccgatgcggaaaccatcttcatcgtgctggcgcagaccctgctgccgagcttcatgtgcggcgtggtggtctccggcattttcgcggcctcgatgagctccagctcctcgtatctgatcatcggcgcttcggccatgggcgagaacatcttccgcgggctgctgcaccgcaaggccaccgacaagcaggtcatgattgtggccagggtcacgctggtggtcatgttcctgttcggcattctggtggcatacgaccagaactcgtcgatcttccaggtggtgtcttacgcgtgggccgggcttggtgcctcattcggcccgttgatgctgtgctcgctatactggcgtcgcgccaacaaggccggcgccgtggccggcatgctgtccggcacggcggccgtgctgatctggcacaacctcgtcaagcccttgggcggcgtattcgccatctatgagctgctgccggcgttcatcatttcgctgctgttcatcgtggtggtttcgttgctgaccgccaagccgaacaagcgcatgctctacgaattcgaccactacatggacgatccgctgcccggcaccctgccgtccggcaccgtgctcgtcgacgagcccatggaagccatggagtccgaggtccgcagcggcaaatgacacgtgcctgctgtgcggtcggctcgtatggcagaggagtggcttttttgtggttcggcaggaaccattgaggccaaaacggacttcgaggggctgatttgacgttctggagagatctacttccgtttcaaggggctgatgcctgagtagatgcggctccaaaacggcggaatggcgttgacgtaagggcattgatacacgtggtctagcggatgatcagccccttgaaacggaagtagacctccggcggaggccaaatcagccccttgaaatgggttttgaataccgtagcgcggtgcggacggtgcggactgactctaccgggcttattattcctgcgtcgtcggaataattggcagcagaggctcgaatttcagccgtttgtacagtggaatacggcgtagctttcggacatcgctaatttgctgggtagtttgccgcatcgtgagctggaccgttttgcccgtaacctcctgtatcctttcggcaactcttcgggcaagggcctcttctcccgcttcgtcgccaatatctaatttggtgacttgaatgtacttccagccagcatcttcgatcatctggcggcgtctcgcgtcattcagccattgcccggcatgatgagagccttcgtattcgatacatatcttgaattcagggtatgcaagatcgagatatatgggtctggtgttgtttcctacgaatattggataattcacctgcgggcaattcagaccgtatttcaagagaaccaaacgagttcgtgtttccatggaggaatctgtgcccgcgcgcgccaaaagtagggcgcgacggcatttgttatacccgcggaacaaatacgaattggtgccattctctttgtcggctcgcacctgggcctcggcctcatcgagatacagagaaagggcgtcgatggttgttctgcagagccttcgatctcgtcgcatcatggaatcagcgagaacgatgagttcttcaagttcgagatacgtggagaacatggcccatgtgcaagctggtgaagtgcatgtgaattgtccctcgattatgaccgtgtctagtggaaaaggccatacaaccactttgacccccacaatgtgccgtttgtcattggcgtgtggaaccgcaacaatggttgtagttgcaaggcctctgtgtttgcttgatatgcggggtacttcaattgacaaaagctccaacgctgttgtcagggcatagggtgggcgccatgcgcttcgtcgttgaacatctgcgcacgtctgcattcgttggtacttctgcattgtcagctcggtcaatgccgttgagctacccatgatgatcaccccttcgtgatgttcgctttgtcctcgcagtgtagagtccggctaccggccctgtctaccgccccaatttttcggtggataaatgtggataagtcggtggataaactatgggtgttcatcgcagttgcaggccatcccgcaattacatggaacgtaggggtttgcaggcagccagcgggaatcgccgtcgacggcgcgattcaacttggacgaatctccatggcgttcatgcaaaggtggcatgatggccggtatgagtagcttggtgcgtattgtcaatgccggtgttccggggtctcaggaccgcgtggatgtggtgcttcgcgatggggttgttgcgtctgtcggccctgctggaacggtctcggcttcggacagcacgatgcagactaaggcgcatgcgacatcgttggcatacgcgacgaatgccattgcttctggcagcgtctcaatcccaacgtcggccgccgcacccgccgacgaaaccaccatcgacgccgacggcctgtgggttattcccggcctgtgggactgccacacgcacttcacgcaatgggctaagacgctgggccgactggacctcatcaatgcccgttccgccgccgaagcgatggacatgttgcgccgtcatctggatgagcgccgcgccgccgacacgcttgacccagatgccttcgtggtgggcatgcgattccgtcactcgctgtgggccgacgacgagcagcccacactggccgcaattgacgccgtgaccggcgaacagccggtggccctctccagcgcggacatgcactgcggatgggtgaattccgccgcggcccgcaggcttggcgtacatgtggacgaatccggtctggtcggtgaactcgaatggttcaacgcctacaccgccttcgacaaggcgccgggcgctgctgaagagactgaccgtctgctgcgcgaggccgaacaggacgccgcaagcaagggcgtggtgggcatccgcgattatgaaatggccgaaaacatcgatacatggatcaatcgtttcgcggccggcattaacggtttgcgcgtggacgccggtgtataccccgagcggttgcgagccgccattgacgcgggttggcataccggcaaggaattgccgggcagcgccgggcttggccatgtgggcgccatgaagctcatctcggacggatcgctcaacacccgctccgcctactgctccacgccgtattcgggcatcgagccgctgacgtatggcacgctgagctacacgccgcagcaaatcgaagactatatgcgcctagccaccgagcatggcttcgacattgcctgccacgccattggcgacgaagcgaacaccattgcgctcaacgcagtcgccgccacgcacgcacatggatcgatcgagcatgcgcagatgctcaaacccgtcgatatcccgcgtttcgccgagctggggctcacggccagcatccagccgcagcacgccatggatgaccgcgacgtcatcacccgtttctgggccaacccggccggcatcccttatccgttcagggccctccacgacgccggtaccacgctgcgcatgggctcggatgcgcccgtggccccgctggacccgtggctggccatttccgccgccgtgctcggcaccgaaagctctgaccgcgagccgttccagcccgagcagtgcctcgatgtgcatacctcgctggcagcctcgaccgccactggccgtgaccgccttgcatccggcgacccggccgatgtggtgttgctggacgccgacccatacgccgccgatactccggaagccatgcgcgctatgccgcaacacgtcgtaatgacattgctgtgcggggagcgtacgtattgatgcaagccatcggcatgaagtgaacagaggtccgtcttgatagccgcgttgcacggaaaaacaagaaatccgcccctcgaagtgaagataggacacagcagacgccgcaatacaaaaacgccgtgtcagttgcccagttggggctgacacggcgtcttgctacgagcggcgggaaaatcagtacttcatgcccatggcctcgcgcacctggtcgagggtctcctcggcgatggcgttggcgcgcttgttgccgtcgtgcaggatgtcacgaatggaatccatgtccttggccagctcggcgcggcgctcgcggtgcggggccaggaactcgttgactgattcgatgacgtatgccttgagcgcgccggcgccggaatcaccgatctcctcggcgatgtccttcgggtcgcggccggtcaccaggccggcggtggtcagcagggcggagacctgcgggcgggcaaccgggtcgaaggtgatgcggcgctcggaatcggtcgggctcttcttgatgagcttggcggtttcctcggcggtggcgcccagcatgatggagttgccgtacgacttgctcatcttgcggccgtcgagacccggaatctccggtgcctcagacagaatggcggccggctccgggaacaccgggttcttcttggcgtaacgctcgttgaaacggcgggcgatggtgcgcgtgatttccacgtgcggcaggttgtccttgccgatcggcacgacattggccttgcagaagaggatgtcgcacgcctgatgcaccgggtaggtgagcagcagaccggtcagcgcgtggccggacgcctccatctcggacttcacggtcgggttgcggtgcagctcggcctcggtgaccaaggacaggaacggcagcagtagctggttctcggccggcacggcggagtgggtgaacatcatggtcttgttcggatcgatgccggcggccatgtagtcgagcaccaggttcagcacgttgtcttggatgtgctcggtggtgtcgcggtcggtgatcacctggtagtcggcgatgatgatgttcgtgttgacgccgcgctcctgcatggcgacacgctcacggatcgagccgaagtagtggccgaggtgcagccggccggtcgggcggtcgccggtcaacatggtgaaggacgacggcttggcctccagcttggcgagcgtttcgtccgaacgctttttggccgcgaggaagctcgcgctcatctcattgcctgccgctgtcagttgctgctcgtcggtcatgcgaaaatcctttgaatatgccctaaataaacgctttttatggtaaaagtgtgagccgacaacgaacaagccactattagtggtactctctattgttgatgaatcgaacagcacagtaatcgcagggggtcagatgggccgcggacgtcaaaaagcaaaacagcagaaaattgcccgaaagctcaagtacctgaccaccgataccgactacgatgagctggcaaaagagctgagcgagcaggagccgggaatgggctctcctgacccgttcgccgacatcgatgaccagtatgcggacaaggatgtggattccgctgctgatgaccacgcttccggtgccgccgaggcagctcccgctacgcaggaggatgacctcgacgagtacgccaagtgggctgccgaagccgccgcaaaggcgaccagcggcgagttcccggcctccgcgcctgccgcaccgaagccggccccgcgcaagccgattccgatgcccatgccttccgcgctcaagcccaagaagagctgaacgccggtcttctcgtaataatccccttgtgcttggttgagcacaaggggatttgtggttatggctgatggtgccgccgctggtggcttacttacgcttcgcgcctcacagcggcagcaggtcgctcaggtcgtcgcgctcgccgaccgcgctgatgtggccggcgtccttttcctctgcccatgtggtgatgccgcaggccagccgcagccagacttccgggtccagctcgatgacgtccggcggggtcaggttatgcgggtccgattccgggccgtccaagattttgaccgccccccacggcgcgacacgcacctccacgccagggccgggtgcgcgccgctccagcagaaacagcgagtagcgcacggccatcgcccacaccgggcgtggcaagacaggggagacggtcagacgatgtggtgtgttgtccgccagctcccgggccgcggcacgccattgcaccagcgcgtcatgcccgcgtttcaggtctttttcaagaattactgccatgtatcccatcatggcaccggagccggaagatcttccataatgcaaacgatggcatacggtgtgatgcggaatatcggggcatgtgctacgctctaaatgagaacgtatgcaagaacgctccgccatcgccgttacggagagttcatgcttacgtttgtgcgacgatacctatcgcgcggcataataaacacgggcacttatcccggaaggaaagtcagaatgaccgaaatcaccgcaccgaagtctcctgtcacggcggaacaattcgccgacgagattcgtgaacaactgaaatacactcagaacgtcaccaccgagcaggctacccctgctgacgtgtatgtcgccgcatccaaggccgtgcgcaaccaccttgccgactcctggttcaagacccaggccgacaccgtgaacggcaacaccaaggccgtcggctacctgtccgcagaattcctgatgggtaagcagctgcgcaacgcgctgctcaacgccggtctgaccgagcagttcgacaaggccgtggaagccctcggcttcaaggtccaggacgtcgtcgacgccgaatacgagccgggcctcggcaacggcggcctcggccgtctggccgcctgcttcatcgactccctcgcctcgctgggcgtgccggccttcggctacggcatccagtacaagtacggcatcttcaagcaggagttcgacaaggacggcaagcaggtcgaaaccccggactactggctggccaacgaagagccgtggggccacatcgactacaaccgcgaccagaaggtttccttcggcggcaaggtcgtcgagaacgccgacggcaccaagacctggcagcccgcatggtccgtgcgcgccgtgccggtggactacctggtccccggctacaagtccggccgcgtgaacaccctgcgcctgtggagcgccaagagctacgacgagttcgatctgctcgccttcaaccgctccgagtacatggaagccgtgaccccgcaggtcaaggccgagaacatctccaagattctctacccggaagactccaccaaggtcggcaaggaactgcgccttgagcagcagtacttcttcgtctccgcctccctgcacgacgccatccgcgtcttctacccgggccaggacaagccggatctgacgactttcccgaacaagatcgtcttccagctcaacgacacccacccggtgatcggcatccccgagctcatgcgcatcctcatcgatgagtacggctacgactgggataccgcgtggtccatcaccaccaagaccttcaactacacctgccacaccctgctgccggaggcccttgaggtctggccggccagcctgatcggcgagctgctgccgcgtcaccttgagatcatcgagaagatcaacgcgcagttcgaggacgagctcaagtccaagggcgtcgacaagaacaccatcaaggacatggccatctacactggcgacgccgtgcgcatggcctacttggccacctacggcggctcccacgtcaacggcgtggccgagctgcactcccagctcctgaaggacgtcaccctcaagaacttctccgacgtctacccggacaagttcaccaacgtgaccaacggcgtgactccgcgtcgcttcgtcaagctcgccaacccgcgcctgtccgacctcatcaccgagggcctcggcaccgacaagtggctctccgacctggagatgctcaagggcctcgagccgctggccaaggacgatgaattcgtcaagaagttcgccgccgtcaagaaggccaacaaggtcgacttcgccgcctacgccaagcgcgagtacggcttcgagctcgacccgaacaccatgttcaacaccatggttaagcgcctgcacgagtacaagcgccagtccctgaagatcctgtccgtcatctccacctacgccgacatcaagtccggcaaggtcaaggccgaggacgtcaccccgcgcaccgtgttcttcggtgccaaggccgccccgggctactacctggccaagatgaccatccagctcatcaacaacgtctcccgcgtggtcaacaacgatccggacgtcaagggcaagctggccgtgtacttcccgtggaactacaatgtgcgcctcgcccagcacctgattcccgccaccgacctcgacgagcagatctcgcaggccggcaaggaggcctcgggtaccggcaacatgaagttcgccctcaacggcgcgatgaccgtcggtacgctcgatggcgcgaacgtcgagatccgtgagcgcgtcggcgccgagaacttcttcctgttcggcatgaccgtcgacgaggtcgagaagaagtacgccgagggctacaatcccgcctcctactacgaggccgacccgcgcctgaagcaggccatcgatctggtggccgacggcaccttctccaacggcgaccgcaacgcctactccccgctcgtggccgactggctgaccaaggactggttcatgaccttggccgacttctccgcctacatggacatccagtccgagatcgaggccctctacgctgatgagctcgaatggaaccgcaaggccctgctcaacgtggccaactccggctacttcagctccgaccgctccatggaagactatttggaacgtatctggcacactgctcctctggctgactgagtgagcgagttgctagcgtgcggttttcacgaaatcagccttgacttcgtgaaaaccgtacgctgagttggagtaagcgtgcggttttcacgaaatgaaccttgatttcgtgaagaacgtacgctgagcgcgactcagtgtacggttttcacgaagtagggctttatttcgcggaaaccgtacgctgactgagctacctctagccccctctgatgagggggatgtcagcgaagctgactgggggagagacttctcccagacgcccaagacatacaagaaagccccgcaatgatatatcgatcgacgatatatcattgcggggctttcttgtgttgaaagaagagagggggtatcaggcctcggccggagcttcggctgcgggcttgtcctcatcctcggccttattcagacccaggtcgaccggcgaggagctgttctcccacggctcctcccacggatcgtaatccgggttctgctgcttgtagatgtacaggccaacaagcgcggcgagcaatccgccgaacagcagcgcgaagaacttccaaccgttagaagacttgttctccatgacggctcctttccctagggatcgtctggtcggtatgcccattcagaccgactctgctccctattctaggccgctgtttgtgacgattgggtggaatgacattcgtgggcgattcatccgcgcccgtctgcccttggccggctcggcatcttcgcggcgcgtggaacgcatccgagaccttcgatacagtgggctgcatgcatattcctacacaacgggagattcgataccagtgggagcgcggtggtccggtgatgacctgggcgctgattgttgcgtgcgtggcagtgtggctactggaggtattgctgggatttattgccccgggcctgagggcttggttgatgtacctcggcatggcggctccggtcagactggtggctgagccgtggacgctcatcacctcgatgttcctgcatgcgccgaactcgctattgcatatcctgttcaacatgattgccctgtattccgtgggcccagtgctggaacgaatgatcggccactggcggttcttgggactgtatgtgatttccggccttggcggctctctgggacttatggtgtgggctgcggtggctccgggaggcatcggctggcaaatggcagcctatggggcttctggagccttatttggcctgtttgcatcattgctggtggtatatcgccgtatcggcgccgatatccgctccatgttgatctggatggcggtgaacttcgccttgccgttcgtggtcggtggcgtggcgtggcaggcgcatgtcggcggctttgtagtgggtggaatactcacatggctgctggtgggtggtgtgccggcgtggcgcggtaaaagcctgaaatggcgcatgcaggtgtacggctgggccatggtggtgctggtcattgcgttgattctgttgtgcaatatggccaatccttacgggtggatgagtttcggctccctgcactgatatggcttgatatggctgtaaaaaaacgattgatgccgggtattgcggaacatgcagtgcccggcatcaatgtatgtgcggaaagcgacgatgtggatattagcgatgtggatatcgtcgttcggcgagtgggtgtgtgccgtatgaagatatccacagtaatgagatgcgcgcaatgacgagttatccacgataatgagttatccacaatggtgacttgtgcacaagtgtgtagaaaagtgcataagactgtggataacttatgtggataagttaggaatgccgcggtattattgggtttgttgcagtggataactcgggtgtataactgttccctcgctgtggcgatgtatgccaagccaaagttatgcacgagatatacaccgagaaacgccgcttatccaccacttatccacatggttttccacattcggtggaaaactacatgggtgtaattcatccacaggctgtggataacgtagtggataagtcgtggataagtggtggatagctgtggatgaacaggctaaggcacgaaaaaagccgacctccgcatacgggaggtcggcctttctcataagaactaagaacaacctaacgatagaaaaaacgatctaccgatagataagcgcaacgagccggaactcagcgccatcccatcgtcatcaggaatccgatcatgatcagggcgaaaccgatgccgaggttccacgcaccgatgtttggaatcggccaggagccggacggggagaggtagtacaccacgcaccaaatcaggccgatgatcataagcgcgcagaacagcggcacgaaccaacgcgggttcgacttggtgcccttaatggtttcttcaacgcgcttggtgttctccgcctggcggttcatcatacgctgcatctgcggggtcagcgtggccttatcggcagtggcgttgagcacggcctgcacctgctccatattcacgccgtaagccgcgtcttcctcggcagaagcgttctctgcgttctgctcggtgtctttgctggcggtctcgtcagcaacggtgctggatgaggtctcgctctgccagtccttctggttgttcgagtcggtttcgtgcagctcttcgtcagccatcagcatagtctccattcaataggctaaaagtcataatagtggctacactcgaaagcggcgaccagagtcggcaagaagacaggaaattcatggccagacatgtaggtaagcacggtgcacggcactccctatggggtggtgtcgcggtattcgtcgtcattgccttgaccggttttctgctgagcaccaacgtgagggtcaatcgtacggttgccgtcaccaacgatacggctgatctggtggagcaaggcgtggacgaggtcaaccagctgcagcaggacgtcagcgatctgaccgaacaggtcgccaatcttacggacgcgctcaaggccgatggcaccgacagcacacagaaccaaggcaaggactccagcaatgtggattccagcctgatgctgcccgcgctcagcggcagcggcgtaacggtaacgctggatgattctccgttgtgggagaacgcagtcaacaacaacggcacgaccgccaatatcaacgattacgtgatccaccagcaggacgtcgaatcggtggtgaatgccttgtgggccggcggtgccgatgcgctgatgattatggatcagcgggtgctgttcaattcggcggtcatctgttccggcaacgtgctgtcgttgcacggtaagaaatactcgccgccgttcaccatttccgcgattggtgactctcaaagacttcgcgcagcgttgaacgactccgaagccattaccattcttaagcaatatgtgaccgcgtttggcattggctacaaggtggagaatgccgaggaccttcagttccccgctaccgccgccttgctgcagcagttgaaatatgccacggtcgatacgtcaaagaccacagatgaggagcagactcagcaatgagacacggcaggcacaacagcggcgtaccggcgcccattgatctcgcgtccgtgtcggacgtacagcccttccccgaggacgatgccgcacgaatggcggcagacccggccaacgccagtagggcaaggtcccgtcgtgccgcagtacgcggcgcgtcttcgccccagcggagcccggtctggcaggcactcggcatctgcgccgaactgctgattaccgctgccgtgatttgcgccctgtacatcgtctggcagatgtggtggaccggtgtcgaggcggagcgagcccagaacgaaaccacccagtccgtcgactggagcgaccccagcaacaacgggggaacggtcaccatcgccaaagcccaggagggcgatgcgccggtacagccgaaagacgcgaaatatggcgacttgattgcgcagatctacattccgcgcttcggctcccaatggcaccgcaacatcgtggaaggcaccacgctcgagcagctcaatcgccacggtctgggccattacgacaccacccagatgccggggcaggtcggcaacttcgccgtcgccggccaccgcaacggctacgggcagccgttgggcgatgtggacaagttgcaggaaggcgatcccatcatcgttcgtaccaaggattactggtacgtctaccactacacccggtacgagattgtgctgcccacggacgtgcatgtgatcgcccccaatccggaagactccactgccaatcccaccaaacgcatgatcacactgaccacctgtgagccgaaatactccacccccacccatcgatggatcagctatggtgagttggcgtactgggccaaagtgtccgacggtgtgcccaaagagctggctactactgattcgtccggtgcagtgatgttctccaccaccgaaaccccctcgatcgcttcccgcattggctcgctggacaaggtggtattcggcgcgctggtagtgtggctggttctgttcattgccgctgcggtggcatggcgctggccggtgctgcgcgagattcgcgcgggtgagcgtcgccgtccggatgccagcatctatggcggactgttgcgtctgcagcccggcgtggcaccgattcgatggttgctgctggctctgctgctgttcgcagccgccgcggcgctgttccagtggggattcccttgggccgccgccaatatcccattcctacagcagatgtcgaacttcgtggcagcgagctgacggcatcctagtactatggcttgcagtacacgtccctcaaggagagccctatgaccgattccgcgcatattttggtggtggataactacgattccttcgtctacacgatcgtaggctatctgcaaacccttggcgccactgttgatgtggtgcgtaacgacgctatcgacccagccgcgccgggtgtactggacggttacgatggcgtgctgatttctcccggccctggtgctccggccgaatccggtgccagtgaggatatgattcgcctgtgcgcggccagcggcgtgccgatgtttggtgtgtgcctgggcttgcaggcgctcgctgaggtgtacggctgcactgtggaccatgcgcccaccatcatgcatggcaagaccagcttggtggaacatatcgatgacgagattttcgagggcgtggccaaccccatgaccgccacccgctaccattcgttggccgtcgagcccgattcggtgccggatacgctggtggttaccgcgtggacgcaaggcgaccacattattcagggcgtgcgtgtcaagggcaagccgatgtacgccgtgcaattccatcccgaatccgtgatgacccaggacggctaccgtctgctggccaactggcttaaggtctgcggccaagacaacgccgtggccaagtccgccggcctccagcccaaagttacgaagtagcttttccgcgcggcgatactctccccggaatgtgtcgctagaacgaggcttgcgtactggttttgcgacgcttcccgggattgttgcgctgggatagctctttatacagcaaaggggaggggtgcagaagcccttcccctttgtgttgcgtgtatgtgttgcgctatttgcgttgcatatgcgcaacacatacacgcccggcgcttacttgctactcaccggttcactcaccggttccgcccccgttgccagtaccgttgccaccgtctccggtaccggtaccgccgccagtgctgccggccttcgtggtaatggtgacggtcgatcccgcatctacctggctgccagcgccaggattgatgctgactaccacagcggtgctgccggttggaccattggcctgagccttgaggcccacggccttgagcatgagttcggcggtgacgtagtcagtgccagcggtgatattcggcacagcgaccttctccttgcccgtggacacccaaatggtgatgaacccgccctgtgcgatggaagagcccgaatcagggcttacacgggtaatcagaccggcctccaccgtatcggagctctcctgctccacagtgaagctgaacttgccctcatactgctgtagcacgctgtccttcgactgaccgaccaaattgctcggtacggtggtcatgccggaagaaacatatatggtgatggtggtgcccttgggaaccgactgaccggcggcaggatcggttttcgtcaccatatccttggcgatgtcggcgctgtcttcggttttgacggcggcgttcaccttgaacccggcgctttccagaatgctgcgcgcctcttcctggctgcgttccttgacatccggaacctgagtggactgcgggcctgcggagaaccacaccttcacggcagatcccttggccaccttggagccggcgtccgggctcatcttggtgcaggtgccttccggctcggtggagtcggtgtcttgcttttcggtcatcttcaaacccgatgccttgagtttgagctcgatgctgtccttggatgtggaagcgttgcacacctcagggatggtgacggtgtcttccgaggacttgttgccggagccgttcatggcgaacacgatgcccacaatgacaagcactgcaacaatcgctgcgatcaccgaaccgatgatgatcttcttgcgcttcttggccttggccgccgccgcacgctgctgcgcacgggactgcaacgccgctgagttggcaccattggccggtggaatctgctcgaactgaccggtcaccgggttgaatgcttgggtgggttgctgatgcggttccaccggcgtggtgggcaaatcacgttcggcttccttgcgggccttcatattcgacaggtccgtcaacgggttgaacgcggccgccaccggcacgccgccgttcatgtaggtcaggatgtcggtcttgaattcggaggccgtggcatagcgattctggcggtccttggccatggccttggcgcagatcgaatcccacatcttcggcagccccggcaccacggcggatggcggcgtggcgacttcggaaacatgctggtaggcgatggccacggcggaatcgccggtaaacggcgggcggccggtgagcatctcgtagagcacgcagccggcggaatacaggtcggaacgcatgtcgacggtctcgccgcgcgcctgctcgggagaaaggtactgtgcggtgcccaccacgccctgcgactgggtcatggtggctgcggaatcgtccagagcacgggcgatgccgaagtccatgaccttgaccacgccctgctcggaaatcatgatgttgccgggcttgatatcgcggtggataatgcccatgcgatgcgaatagtcgagcgcgttaagcacgcccaacatcacctgttcgcagtcgcgctggctgagtgcgccgttgaccttgatgatgtcgcgcagggtctggcccttgacgtattccatgacgatgtatggcagacgctcggcatcgccgctttcggaagaaaccagttcttctcccgaatcgtagatgttcacgatgttcgggttgttcatctgggccacggcgtgtgcttcgcggcggaaacgggccaggaagatgtcgtcgttggccagatcggcgcgcatgattttcacggccacggtacggcccagacgggtgtcaagagccacgtggacctcggccatgccgccacgaccgatgagctggccaagctggtagcgtccgccggccaatgcggtgggcatactggtgctcattgcttattccctcccaatcttgaggccggggcctccaaaacaatgcgtggcgtgctggtcactcggcgcggcagtcgattgccggacgtggccatggcggtgtcggccatttcggtctgctgatccagcagacggcgttcgatgcgtgccagcgtacgggacaccaccagcgcgtctttcgggcgatccaacgggtccttggccagcattgacatgacaaattcgcgtaactggacgtccaccgagtccggcagcggaggcacgggattgttcacgtgcgctgcggcgatatcgaccggagtggtgccggtgaacggacgatgcccggcaaggccctcgtacgccactacgcccagtgaatagatgtccgattgcggcgtggcctgctggccctgcgcctgctcgggggagatgtattgtgcggtgcccaccaccatgccgtcctgggtgatctggccctgacccgtggagtagctcacaccgaaatcggtgattttcacttcgccggtgtcggaaaccatgatgttggccggcttgacgtcacgatgaatcacgccgtgcgagtgggccacgaacaggcctcgcgcggtctgaatcaggatgggcagcagttcgatgggatccatcgcgcccttgctgtggaacaggtccgccaacgatttcgaggggacgtattccataatcagaaagccgatgccgtcatgctcgtagtattcgaacaacgcagcgatattcggatgcgccagattggcggaattatgggcttcggcacgcagacggcgtagcttggcctcggcgttggtcatgtccgagcgcagcgccttgatggccacttcacggccgagctgaatatcgtagcctttccagacctcgcccataccgccttgcgcaagacgcgaatcaagacgatatcggcggtgaataagctgtccttcgataagtttcactgctgcaaagcctcctgcatcatcgcgcgcatgatcgggccagcggcgagcgaaccgtgtacatctgtgttatgcaccaacaccgcgacggcgatttgcggatcgtccgccggcgcgaaaccgatcacccagccgtcgatggcagagttgtcgataccgatttgtgcggtaccggttttggccgccaccttgatgccgtcgatggccagctgcggattggcctcggacaccacgctttccatcatcgtggtgagcttgtctacggaatccttgctgaacgcattggccatggtctgcggcttggtctgcgaaagcacggtgagatcggcggcgcgcacacgatcgaccagcgtgggctgcatcagtttgccgttgttggcgattgcctgcgcgaccatcgccatctgcaacggcgtggccgtggtgtcgccttggccgatggacgccagcgcaagcttgtcgtcggtcggatcagaggggaatgtggacgcggtggccgtcatcggggtgcccgtggattcggtgccgtcaatggtgatggtgctgccgaaaccaagcttggtggccatgtccgaaaccttgctcgcgccgagtttcacgccaagctgggcgaacgcggtattggacgaccatgcgacggcctcttgcagggagatctgcccgttgacgccatcgcccggtgcctcgtcgttcggcaactgtgtggcggttcccggcaaggtatagctggcgcccgcaggaatcttcgtgtccgtctgataatcgccggtttccagcgcagccgaggcgacgatgatcttgaacgtggaccctggtgggtacagctgcgaggtggcgcggttgattagagggctattttggcccgcagaaagttcgttgtaggcctgagacgcggctttggtgtcatgggtcgccagtttgttcggatcataactgggcgtgctcaccatggcgaggatacggccggtgttgacttcgatggccaccgccgcaccatcgcgcgtaccgagctgatcgtaggcaacctgctgcagcttggggtcgatggaggtttcgatggacgcgccctgattcgtagtgccggtgagcatggccttggcccgctgccagatcaatgaatcggcctcaccgttgagcagcatgctgcgggaggcttccaggccgcgatcggcggtctggttgatggagaagaagccggtgaccggagcatacagaggaccgttggaataggtgcgcaggtatttgaacgcgtcgttgaccggttcggatttggccatgaccgtgccgtccgaggccagaatggcaccgcggtaggcaccgagctggtggtacagcgaacgggcgttgcgcggatcgttgttcagcgcgttggcccgtaccgccatgatgatggtggacgacaggccgagaatcacgaacagcgctaccacggcggtgaaaagctgacgaagatatttgttcatacgcgagtgcctccgttaacgggaggaagcgggggaatcgtgccggtaggcgtgtacggttcatcggcttcggcatacgacggagtggtggtatccacgatggggtcggcgatgggggccgcagcagagcccgcagaggtcacaattgcgggcacttcgggtgcctcaagtgtgtctggcgcgtgcttggtgatgtccacaatggggtcgtcaaacgattccgactcggactgcgacgccgtagccgacgcgctgcgaggctgaacgatcggctcagtggcgcgggcccgggcctcaagttccttgttgcgcagcacggccaaagcctcgtactggaacgtatccgaggtcagctccggctcgggcgcattggccgagttcgagatgatgatgagcagggtcgcgagaatatagttggcgatcagactggagccgccggccgccatatagggcagggtcagaccggtcagaggaatcaccagcgtgatgccgccgaccacggtgaacacctggaaggccatggtgaacaccagtccggaagcgagcagcttgccgaagccatccttgattttcatggcggtgataaagccggaggcaatgatgagcaggtagagcatcaaaatggccaggacgcccatcagaccgagttcctcgcccagagaggcgtagatgaaatcggagttcgcaaacgtaacgagcgaaggatggccttggccgagaccggtgccgagcatgccgcctgatgccaggccgaaaatgccggtgaccagctgccaggagccgccgggggtcttgttgtattgctcgttgctgaacgggtgcagccaggcatcgactcgctgacccacgtggctgaacatgcctgcggccagcacggcacccgcggcgaacgcgatcagaccgatgatgatccagcttttacggccggtggccgtgtacagcatggccacgaacatggcgaagaacataagcgaggtgcccagatcatgctgcatgatgagcacgcccatcgaggcgatccacaccacgatgatcgggccgagatccttgatacgcggcagctgcagaccgagcatcttcttaccgcccacggccagctggtcgcgatggtcgaacaggtaggcggcgaagaagaacgcaaggaacagcttggcgaactcgcccggctggaactggcccagtcccggaatcctgatccaaatgcgcgcgccgttcacttcctggccgacaaacggcagcatcggggcgagcagcagcaccaagcccaccaccatcgacacgtaggagaagcgccgcagcacgcggtagtccttcaggaagatgatgagcagcgcggaaagcacgatggcgatgcacagccagatcagctgacgttgggcaaccgtccaaccttcgctctggtcaatgcgagcgatcatggtcacgccggtggcggtcagcagtagcacgcaaggcagaatcgactggctggcgtacggctggaagcgcacaatcagcccccacagcaccagaaacagcactacggccaatgccagcatgccggcgtattgcatagggaattcgccggcggtgcgctggaacatctggatgaacgccaacgcactgattgccatggcaatcagcaacaaagaaatctgacgtagacgggtaacgatcattgagaatctcccgtggccgcgttgtcggccgctccgataccggatttatccgaggaatcggatgagcttgacgaaccggacttgtctgacgaggagccggactggctggacgaatcctcggtgctgtccttggaatcgctctgggagctgtctttggaactgtccggggaattggacgcctcggccttcttggcggcgtcggcttcctgctgcttggccagtttgcgcatttcggtgcggataatacccacatgcgactgcgcttcgtccaacgaaccgactgtgatgccttggctcagctggtcacgccatgtctgaggcaggtccgcggtggcgatattggtggtctgcacttcgtgcgaaagctcaagtccaaagagattggtcggcacgccacgataaatggccacggtgccgttgctatctcccacgtagtagtgcgtctggctccacgtgtacgcgccccagccagcgccggccaatgccagcacggcaagaatgcaggtaataatcaccgcaagcttattgcggcgcttcttggtgcgcgtggccttcttctgctcgacctgctcatcgcggatggctttggccacatccgggtcgttggggtcggcggacaggcgcccatccggcttttgcaccaccggaatctcaccggtatcgggattggctcgttcaccggtctcctcgcggacggtggacggctgcaccacgcgtgtggacgacggtttggccgtggtttgcgcggtctccgcctcgtgcgcgctggcgggctgaatcaatgctgcggcgcgctgggcgggggaatcatcctcccgcagtgcgggcgcggtagccaccggctcgttgacgatgtcggcaatcggctcaagattacggctggcggcaccgccgaccaacggcgtttggtgcggcagatcgaacgcatcggcatccaacgccaacgtggcatccgcaataacggccgtgacattatcggtgctgcccgcccgcagtgccatctgcaccagacgctgcgcgcattcgccctgatcggacagcgtggtcatcgtctcttcgatggtggaatcttccagcacaccgcacagaccgtccgagcacagcagccaacggtcggcggggtgggctcggcgaatcgaaatatccgggcgcgggtcaatgtcaaagtcgccaagcacgcgcatcacgacgttgcgctgcgggtggttcttggcttcggacggggtgatacgaccggtgttgatgaggtgctgcacgtagctgtggtcgcacgtgatgcggctcaggcgtccgtcgcgcagcaggtaggcgcgcgaatcgccgatatgggcgatgacccagtagccggccaccaatgccactgcggtaacggtggtgcccatgccggcaagcttgcgttcgcgcttggccttgccgacgatggcgtcatgcgcggccataacggaggtttccatcatgcgggagatcgtctcgacgttgccaccggtgtcgtcctgctcgatgtgggccagcgaccggatggcgatggaggatgccgtatcgccgccggcgtgaccgcccatgccgtcgcacatggcgatgagatgctcgccggcgaaggaggaatcctgattgttcgcgcgcacggtgcccacatcggacaccgtggtggaatacaggaacagcggttgtgaagcggcggattttggcatgcggctacctcagttcgaaggtggtggcgccgatgcgcacaggaatacgagcgggcaggatggtggggcggctgatgcgctgctggttgaccacggtgccattggtggagttcaggtcttcaatggcccactgcccggagcgcgtgtcacggtagacacgggcatggtgggaagacacgaattcgtcatcgagcaccacggtattcgaggcggcgcggccaagcgtgatgtcggcttcggccagcggcacggagctgccggcaagcggaccatcgatgatgaccaacagggtaggctgcgccgaggcggcggacgacgcggaagcgctgggctggcgatgcgggcgcggcgcagctgcctgcggcgtttcggccttggccttatgcgcttcacgctcacggcgacgacgcgcgcgcgaaggtcgcggactgaacgtctcgatgtccttgcgcagcgaacgtacggccagccagatgaatatccacagcaggatcaggaatccatacttgagcagggcgaatgtcagttcggtcataagtggacgactttcgggcgtgtgctcgactactcctgggcttgggcggaggcccagtacaggatgcgggtacggccgatggtgatggtgttgccgtcgagcagcgtggcggcgggcacttggtggccctccacgtacgtgccgttggtcgaacccaggtcgcgggcgatcacgccgttatccgtgatgtcgatttccaggtgcttgcgggagatgcccggatcgtcgatgacgatatcgcaaccggaaccgcggccgattaccgtcttgtctttggtgagcaggtactggttgccgttcacctcgagcaccgggctatcctcggtctgcgcatcggtggtgaccggcacggcattgccctgcacggattcggaggtgaggttgaagttgcccttggacaggtcaaggtcttcctcgaagatcacgatcaccgggcccacgaaggcgtaatgctggctcttcgcgtactcggtgaggttatcggccagttcgttggccagggtctcgctaccccatgcctcgatacggtcgaagtcaggagtactgagcttgaaacggtattcattcggggccaccgtgcggtcacggcccacgggcatggcctcggcgtcaatctcgcgctccaaggcgctggaaagatcgacaggctgcaggtctttggagccaaacttggcgaatactccgttgactgcaccctccacgcttttttcaaaacggtcgagaacgctcatagtcctccctttctaatcttcacccatcctacgcggtgatgggaatatgagacaaaaaaccggtctttcacgtgacgatgagtgcaaaatatccaaaaattcagggcggaaatgggtgcggcgcaccacccgaggtgctttaccggtggagcacctcgggtgggatgcgcgtgttatcgatttgtcaggccagcgcgtcgcgcaggaaatcgcgctggagggtgagcaggttttcggccacggtctcgtcattggtcatatgggtgatgcccgtcaacggcaggaaggtgtgcgggcgacccgccgccatcagggcttgcgagaggcgcaggctgtgggcgatggtgacgttgtcgtcggcgaaaccgtggatcagcataagcgggcgctcgagtttcggtgcgtcctgcacgatgccgtttcggtagtagacatccgggtcgaggcccagatagcgctcggtgtagtgcgtgtcgtacagcgtccagtcggtgggcggggcgccggcgcatgcggccttgaacacgttcggcgcgtccagcacggccagtgcggacaggaagccgccgtacgaccagccgatcatgcacaccttgtcgaggtccggcatgggaatcgcctcccgctggcgggaggtggcgcgaagcgccggtgggtggttctcggcgtctgcctgatcgcccgcagccggctgtgccgcacgtgattccacatcggcgttgagccgggcgacggcctcgggcagggcgttgacggcctcgacctgatcggccagcgttacgtccttcatatcctcgaagatctcgcggtcccatgccgggccgcggccggtggtgccacggccgtctgccgtgaccaccaggaagccttggtcggcccaccactggccctcccagtagaaggactgcgaggcgatgacctgctggaagccgggcccgccgtacggcttcatcagcaccggcagcttctcggcgtgcgcgtacgggctttccgggctcggcgcgatgatcgccgtgtacagctggtgctcgcccagtcgcgtaaacgtgacgttcggtgtaaagccgggttcggccgccgtggacgcgatagtggcgctctgttctcccagaatatgccgcatctgggcgcgggcggaacgcatatcgcggccggagaccacgatgccgcgctcgccgcgcgaggcggtccactggccgggatcggtcgtgaccggcgtgatcgtgccgttgtaatcgatactcaccacgtcgaaactgcgggcgtcgtggtcgccgaatacggactcggtggcggccgcatcggcccaagcgtccggcacctcaggcgcgatttcgggcgcgcgctgcaccacggccagcacatcctcgtcggtcacggcgagcaccgtgcgcacgttccagccagccggcgtgaacgggcggccgtccattgtcagacggttggtgtccgtggccatatcgttgagcgagcacaccagacgaccatccggcgtgtaggcgggcgtgccgtgaaccaggtcgatccactgctcgttcgcgtgctcctcaagcacacgcgtggcacccagcgcggccccatccgccgcgactgccacctcaagcacctgatcgcgggtctgacggcggttctgcaccagcaccagcggatcgtggccgcgacgccagttcacggcggccacatactcgtacgcctcgcgatcccaatccacatcggcgttgccggtgatgcccgcgtaccggtcgttctcatcgaacgccagcgtgatcacggtcaggtacacgtcggcgttgcgggtcagcgcgcgcgggtagcggcggccggcgtccggcttctcggggtcggccggatcgctgatgtaccaggtcggctcgtcggcggtgtcgaaagactcgaacagcacatgctgcgaatccggggcccaccagaaaccgtcgtaccggtccatttcttcgccggccacgaactcggccagaccgattttccacgtgttttcggccggattgccgtcctcatcctccacgctcacgccgtagaccgcggtgatgcggtcacctagctcgccgccgatatcgaccagcatcaggtagctgcccgtggtgtacagcacatgttcgccatccggggcgatgcgcgggttcagcaccggcgtgtacatcgccgggtcctcatcgagccattcgccggccagttcacgggtgtgcggctcgggtgcgccggtctcgtcattccaatcgatgtcggtcaggaacaggcggccgttgatggtgaacacgatgcgattgccgtcgtcatctgcggagtatccgacgatgccggtgccgccttcgcgcgcacgctcgcggcgggccttctcctcggccggcacgtcctcgctgtcggcggttgcgcccagcagttcgcgcgggtcggccagcttggtctcatggtgttcgccggactcgtcgaaccagctcagccacagtgcggtcaccagatcctcggggccgtcggagcgcaggaacagggcccgcgagccgtcgcccacggtctgtgcggagcgcggtgcgccgcagccgaagcgcagcgtgcgcgcccggaggcgtgggaaatgcttgattgcgtcattgacatcattggtttcgctcatacctcacaacctacgcgcctgtgcggtcagtggcgcgcaggcttgcgacgcattcccgggaatgtgtcgtggtgtgggtgcgaggtgtgggcgtgaggcttgtcctaagatgggagccatgcaggtgacgatgatcgacgaaaacaagtacgccgaaacgatgaccgacgtggtgctgcccgcgctcgaacaatgctgcgaggagggctggttcgatccgtccgccgccgaacgttcggccgggatcgagccgctgtccggcattatggacaccggcggccgctcgggccagctgcactacctgtgctacgactccgccaaattcgacgcgattcgcgagcaaggcgccaccgccaccttccgcggggccatcgtcatcagccacggcttcaccgagttcgccgaaaagtacgacgagctcgtctggtacttcctgcttgccggctactcggtgtgtgtactcgagcatcgcggccacggcaagtccgcgcgcgacgtggacaaccgctgcatggtgtggattgatgactggcagcgctacgtggccgatctggccggcttcgccgaaaccatcggccagcagtacgcggccggcatgccgctgaacctgttctgccattcgatgggcggcggcatcggcgcggccgtgttggagcgataccccaccctgttcgacaaagcggtgctctctgccccgatgatcgcccccgccaccggcatgccgctgggcgtggcccgtgtgctggtcggcgcgctgtgcggactcggcttcggcaagaagcgcgtgttcgggcagtcgggcttcacgccggaattctcgatggaaggcaacgagggcgcttccgaagcgcgtgaacgctggtacttcaagctgcgttgcgagaatagcgaataccagacctactgcgcggcgttcgaatgggtgcgccaagcgttgaagctcaaccgggccatactgaatccgtccgcctgcgccgaagtggagacgccggtgctgctcttccagtccggacgcgacatctgggtactcaataagccgcagaatcacttcgtccaactggtcaaggacggcggcggcgaggcgaacatcgtgcgcttccccgaatcgcgccacgaaatcttctccatgcccaacagcacttacaagccctacctcgaaaagatcctcggcttctacgacgaccccatgattgcctgcgccgcgtactgatgtagctcttcacccattgttcaccgtgcggtcaccttgtggcccgacccgctttagatggcgggagagccatggaattatgggcataatgtcttctctccgccgccgcgccgccgcggttgcggccgcggtatgtgccggcgtgctcgcgttgaccggttgcacggcgttcaataattccgatgacggcacagcggacggcaacggcacgtccgccaccacgcagaccttccagccgtccggcggcaaaccgactgccaccctgagcattgcctccggctccgaaaacaaggaagtcgccgtcgccatccagaaagcggccgaccaatccaacgtagccgtgacgatgcactacatgggttcgctggagattatgaacgcgctcaaggccggcggccaggattacgacgccgtctggcctgcctccttgatgtggatttcgatgggagacaccaagcacatcgtcaaagacgcggccagcacctccaccacgccgatcgtgttcggcatcgccaaatccaaggccgtcaaactcggctgggctgacgacaccggcgccaccaagcccgtctccaccgcggacatcctcgccgcggtcagcgacggcaaactcacgttctccatgacctccgccacggtgatcgacagcgcgctcaacgtctaccagaccgcgctcaggaaacccagctggaccatttgggtggtcgattactccggttcgatgtctggagagggcaagaacggcgtggtcaaaggcctgaacgcggcgctcgacccggaccaggccaagaagtcgtacatcgagcccgccagcggcgacgtgaacattctcatcccgtttgaaaccgaggcccaccgcccggtcaaggccactggcacaagcaccagcgacctgctgcatgaggccgatgccaccgatgccagcggcggcaccgatatctatgaaggcctgctgagcgcgctcgacgagctgcccagcgagtcggaagcctcgcaatacaccaccgccatcgtgctcatgaccgacggccgctccaactccgatcatcaggacgaattcgaaagcgcctataagtcgcgcggccgtgatctgccgatcttctccatcatgttcggcgatgccgatcccagccagctgaagtctctcgccaccctgagcaacgccaaggtattcgacggccgctccggcgacctcgccgccgtcttccgccaagccaagggcttcaactgatgctccaggtaatctgtggattcgttgtcggactgctgctcgccgggctcggtttcggactggtcggcggcggagtgcccggcctgatcgtggccgtggtactggccgcacttgggtatatcgccgcctccacgctcaccgagccggagcgacgcatcggcaaaatgctggtttccgccttgcccaacggtcagaagaccgccgatacgatcgacgcggcgaacgctcgactcaactcgatcgccatgctcaccaagcaagtacgtgacccagccgtcaaagccgaagccaacgacttcatcgccgctaccaaagatttagtgcaatacgtgacccgagacacctccgcctacccgacgttgcgccactacatcaccgtgtacggcgagcagaccgagaaactgttgcgctcctacgtggacgtggaaagttccggcgcacgcgatcagatagccacggcacgaatcgaaaccatcgaggcgctgcaagtgctcgaacagaccgccgccggcgaactcagccgggcggtaagcgccaagacgttgggcattacggccgactccgacgccatccaacggttggcccgcatggatggatacgacgacgtcgcaccttcgcctgtgccttcctcggctgctgatgaaggacggcatgcacccagtcagactccatctggcggcccggctcaccagtcggaccagaaaacggacgcacaatgaaactctccaaatcaaaaatcatcggactgatcgccctgcttgcggtagtgggcgtggtctgcggcacgctggtgtggcggcaatcgcaaccagcaccggccgaaccgaccgaacaggtgagcatcaccggctacctgggcggcgagaaaatcggcctgttcgatgacgccaagttcaaggcgctcgccgccaagcaaggcattgccatcgactatcgcaaggccggatcgccggccatgatggatacggaccggaaaggcatgggttacctgttcccctcctcgcgcgcggccgtcgaatacggcaatgcgaaaggcgtcaaggccccccaaagcgacatcgtcttcaactcaccgattgtgctatacacgcacaaggccgtggcggacgggctcgtgaacggcggacttgtgaccaaggacgattctggcgcgtaccacatgtgcttgatttggccgtgaaccagccggatgcgttcaagcagatcaaggacgacgtggtcatcgtctacccgacgccgaccgtgtggagcacccacacgctgatggccttggacgagaaaaggcggcacactgctgaacctgttgaaaacaccggcggtgcagaagctggcgtgggagcgccatggcttccgcgcggccaacttcgccggcaccgattcgatcagccgattcggcgtggccggcacgctcgaccagatcccggccgtatccgaactgcccaacaacgatgccatgcaacacctcatcaccaccctccaatccgcgcaagccaaactcgtggccgacatctccatgtacgacacgatgtacacgcagaacgcccagcaataccgcgagctgaaaatgaccgtactggccggcaagaaggcgctcgccgacttcaacgccaaccagctgccagcgctggaggccgaggccgccgccagtggcgacgccatgcaggcgcaagtgctgaaggacttcaagtccaagctcgaccgttttgccaagcgactcgacgacctcgaccgcatcagcgtggttaccttgcagaccgcgccgcagatcaaaatcatccagaacgcggaccagaccatcgtggacaagatcgacaccaccatctccaccacgattccggtgtggaagagtcagatggtgatcgcgctgggcctgtccaaccagcgcaaggccctcgacctgcagaacaaggccgacgatgtgaccaacaagctgctggcgcgcaacgcggccgccctgcaccagggtgcggtggacgcggaaaaggccaaccagcgttccgtggtggaaatcgacacgctggagaagatcaacgccgaactcgtcgccaccctgaaggagaccgtgcagatccagaaggaaggcaaggccaaccgcgaggccgcccaggtcaatatgcgccaaatcgagtccgacctcaaaaacgccttgctcgaaaacgcccagcagatgtgagccgttcgcgcgccagcatgctcccgttggcggagtttgcgggaacgtgcaaccatgctcccgttggcagaggtatatgagtacgcctactggtgtgcgtatatatgctcccgctggcgggagctggcagccgtaagactggctgagggtggtcacggcgctcggctcggccggctttaccggcaactattcccgccgcaatttctctgtgggcataatcccggaatgattgccgcgctcgggaattgggtgaagtgaaggttaaaggttgagagcccgggagggttccggaaccggccacgataaccgctgctagccccgcgatacgggttggcggccggcagccaagccgattctctcctaatcaaggagtaccgattatggcaatgtttccggctttgatgaatgacacgatgttctcggatctgttcgatgatccgttctttgagggttggcgcaacacggacaacacgatgagtgccgtaatgcccgccaacatgatgaccaccgatgtgcgcgagaccgacaagggttacgacgtcgacatcgatatgcctggctttaagaaggaagatatcaaccttgagctcaacaacggctatctgaccgtgtccgcctcgcgttgcagcgagcatgaggacaaggctccggccgctgagggcgaggcttccgacagcaagtgcgcttgcgcgtccgattcgggcaagtggctgcgtcgcgaacgctacatgggctcctgctcgcgtagcttctacgttggcgaggacgtgaaggagtccgacatccacgccagctaccggaacggcacgctgtgcatccaggttccgaagatgcgggcccagccgcaagtcgagtccaagcaccaaatcgcgattgagggctgacgatacttgattcgtcccgaagtcccgcttcgagtagctttgccccctctgacgagggggcagattctagtggtggttgcaacacctgaggtttgagcggccttccatggtcacgttgtcggttgttgaggttatcacgcggcgtcgagcagttcgatgatcttctcgcttggtttcatgaacccgagggttttgcgtggccggtcgttgagttcctcggcgaccgcgtcgaggtagtcctccgggtagacggataggtcggtgcctttggggaagtactggcgcaggagcccgttggtgttctcgttggtgccgcgctgccacggggagtgcgggtcgcagaagtagacggccatgtccagcgaggcgccgatccgtttgtgcagggcgagttccgctccctggtcccaggtcaggctgttgcgcaggagtttgggcaggtgctgcatcttgtcgatgatggcctgctggacgtgttcggcgtcgtgcccgtcgggcaggtgcagcaggatcgtgaacctggtggtgcgctcgacgagcgtgccgatggcgcttttgttgcggctgccggtgatgagatcgccctcccaatggcccgggaccgcccggtcctcgatctccgggggtcgctccgagatcatggccatgggttcgcggaaacggggtttgcggccttggccgccttggggtctgcgggcggttcgcccctgcctcatggcgcgtttcagctcctgcttgagttcgcccctggcctgcaggtagatggcctggtagatcgtctcgacgctcgcgtgcatatccccattatccgggaagtccagcctcagccggttggctatctgctccgggctccaatgcctgcgcaacccggcggcgatctcgtcccacagtcgcgtgccctcggccgccttgcgcggtttggggcgtttgagccggtccgcggccttctgctgggcgcggtaaggctcgtaaccgccggactcgggattcctgttgcgctcgacctcgcggctgaccgtgccggggtcgcggcccagcaggcgggcgatggcgcggatcgaatcgcccagacgcagacggtccgcgatctggatgcgctcctcctggctcaggtatcgcggatggagggtcttgggtttgtccatggtggaacgataccagtccaccaggggtttctcgttccttcccgtggcgcgcgtcctgccgttgcgccacgccttgccggtgcgtttcgagacgccgaccgcgtgcgcggcctgggtgaagttcatgccttcctcgtccagcaggcgcacgtactcggcgcgtctcgcctcgcacatcagcttcctcgtcggatattcgacgccgttgaacgtccaacggtgttccccgccacggtcttcgtttcggtggcttctggtcacctgaccctccttgcggtaggtcaggtgttgcaacgatcactagaacccgccgggggggctcccgcgaagcgggtgggggagagataaatcgtaaccaaaccatgcttcccacgccgtctgccctacgctttcaacgccgactaacctgacagacggcgggaaacatagccaatgcaaatgccgggtagggatttaccctacccggcattttgctgtttcaatcaccgaaccccaccctgttcgcgcgccggtcgcgtgccgttctgcagctgtacacatccgatgagtagaatgccttcgaaacgaggcgagagaggcggacatatggcgaacggcgcacagaacgcaagcggcacaccggcaccggcggcaagccgttccggtggccacgtcgtatccgcgcgcgccacgaccatcggcctgatggcgatcctgctgtggagcttcatgggcggcaccgtgcgcatcgtctccgaaaacttcggcgccacgcttggctcggccctgatttacacggtcggcggcatcctgctgctgatgttccggcgcccggccccgattcgcgagttccccaagaaatacctgattatcggcggcctgttgttcatattttacgaatcgtcgatatccctctcgctgggtctggcctctaccgacgcatcctcggtagaagtgagcctggtcaactatctgtggcccacgatgatggtgctgctgtcggcgggcgtatcccatcgcaagcacgcggtcgtcaaggtgctgccgggcgcgatcgtggccactgccggcgtggtgctggcggtcggcggtaattccgggctcgactggcatgcggccgtgcagcatatcgccgccgaccctttgccctatgcgctggcgttcgtgggcgcgctcgcttggtcggtgtacgcggtgttcacgccagccatgagtcatggggtggacggcacttcattgttcttcccctgcgtggccgtggcgttgtggattatccacttcgcgtccgggcaggggtggccggccgagcctccgagtctggtcgcatggctgtttgtgttgattgccgcggcggcgattggcggtggttatgcctgctggggctatggcattctgcatgggtctatggagcggcttgctattgcgtcctatgccacgccggtgctgtccaccggggccagtgcggtgttgctgggtttagcgctgtcgctgccgttttggtgtggcgcgctgctggtggtcgccggatcggtgctcaattacttggtcagtgcgcgcaaataggggggtggctttgctcatggggcggtaataatcccatggggcggtaaaaccctcatggggcggtatcccaaaatggctttattctgccgtttcacaatttcttcaaaccgccccatgggccttttaccgccccatggataaattaccgcccgatgggcagcagcaacttactcgccgcgacgctcggacgggcggcgaatcgggtcaagcagcgtattcggatcggagatgccgaacatgctgcgcccgccggtggattcagggtgcttggcgagaacggccagcgaaatcgcccccggaatcataatgatcaccaaaagggccgccaatccccagttcacgaagaatccgagccccagtacgatggccaccacaaccaccaccgtgacgataatcgtcaacagtgctcgacgtgggttggtttccctggcccaagaggtgctggctgcgggttttgctgttgaactggccgcggcgtttgtggctgttgtgccatcagccgtgacggtcgtgggccttgccgccgcgctcgtcgcggggccagtaggggcgtcagacacgttatcggcggcattgccggtcgctgctggacgttgttcgtttgcgtgagtcatatccaccagcatattccctgcttccggctgaagctgggacaagcctgcgcgccgctaatccagcgctgacactggccttgagctgcggacgtccagaccggatgtgaacaggtgctgaacggagtctggggaaaccatgagaactcgcgacaatttttgtgaaattgggtgacgctctatgaatcgcgcgctagtgttgcgtgagcttacaaggcgaggagcctggagcgcgggggtgaaggatgaagaactccgtttggaaaacgttcatggaattgtcgctggtccgcggaatcgtgccgtggaccgtgttcggactgaccgcgatcgcggcaatcatactgattattggactggcgctgagcaagagcaataagcgcggccgcctgcacccgctgattgtctcgctgattgccgccgtgctcgccggcgcggctggactgctggttgcatggctggtgtccgacgtgtttatggtgtttggcgtatcgctgggctggccggtgatcttcaccatcgcgggcggcatcgccggcgtcggcttcgtgatcgccgcagccgtaaccatgcgcggagcccgccgtgtgctggccatcgtgctggtgccgctggtgctgctgtccactgcgctcggcgtggactcgttttacggcgaataccagaccatcggcaccctcgtcggctacacgccgtacgcctcgctcggctcaatcgaggtacacaaggccgcgatgagcgtcagcgactggcgtagcaaggcgcagaagggcagcctgccgtccatgcccagccaaggcaaggtgctcaccgtcgacattccgaacgccaaatccaacttcacggcccgcaaggcgatgatctacctgccgcccgccgcgctgtccgaccgtccgccggccttgccagtgatggagctgttggccgggcagcccggtagccccagtcgcctcatcgacgccggcaacatcgccgccacgatgaatgcgtacgccgccaaacatgacgggctcgcgccgatcgtgctcgtgcccgaccagaacggcgaggccacgcacaacagcctgtgcgccgacaccacgcaaggcaacgccgaaacctacctcaccacagacgtggtgaactgggccaagaagatgctgcccgtggccaaatcggcccgcatgtgggcgatgggcgggttctcgcaaggcggcacctgcaccacgcagctcgtcccgcgtcatcccgaaatctacggcgcgatgctaccggtggacggcgaactcaagccgaccaatggcagcgtcggcaagatgatccaggagtatttcgccggcgaccgcaaggcatacgacgaacaggtgccggtcaacgccatcgcctccaccggcacatctgagcaggcgctgttcaccggtgctggcgaacgggacaaggaatcgattagcaacatgcgcacgattgccgccgccgcgcgcaaagccggcatggaggtcatcgagctgatcgtgcccggcaccggccacgactggcacgcggtgcaggcggtctggcggcccggtctcgactggttcggcgaacggaccggcttgggcgagatgacgaaatcgttgaaggagtacccacaagtggaggtgttgcaatgagcgaagaatcgcgtaagcacaacagtcatgcggcggaaagctggcgcgaactggccggcgacgtgcgacagtgggcggacggtcatcgactggccatcactgccacggtggcgctggtggtgctgaacttggtggtgtggctggtggtcgcgatggccggattcgcgttcccgctgcggctcgacaccagcatggccgaattcgatttcggcaaactcttctgtacgctgttcttggcgcgcggcgtcatccagctcattcttgatgccgtgctgtggctcgtcatgctgtcaatcgccgagccgtggcttggccgcgcacgtaccgtcggcaccgcgctcgcctgcgcgctcggcggcgtgatcgtgggcctgaccttgtgtgcggcggccggatggctgttccaggactcccaattcgtctcccgcatgcagttcgccctgagcccgctggtgttgccggtcggcgcgcttatggcggccagcgcgttctgcagccatctgttgcggcggcgtattcggctgatcggctacgtggcgattctggtcgcgctgctttacagcggcaatcctggcgattactgcattctcgccgccgcgctgatcggacacgcggtcggccgcgtgatggccgggccgcccgcgcacgccgaaaccggatggcactggctgcgcagcacctccttcgaggcgcggcgcatgtttgcggccatcgccgtggtgctggcgctggggccgatcatcgccatcacctcgcataatcacgcggggccgctcagcacggtcggcctgctcatgagcccggtctccgtcgacgacggcacgctcgcgcgctgcctggccggcgccacgcacagcggctgcttcctgcaattcgacctattgcgagcctcgatgccgggcgcggtactgcgttcgctgctgcccaccgccgtgaccctggtgctggcgtggggcctgtaccgcggccgtcggttcgcggccacctgcgccgtggccatcaacctgttcacggcgggcgttgccatcgtctattacctggtcgtcccgctgagctttgcgccggatggcatgacctccctgctgcagcacggcgcaatcaccgcctgcgtgacgaacaccttgccgccgctgatcttcgccatcgccttggctgcagcaatgaagcacttcccgattcgcgtcggctggcgccggctgatcggcggcgtcggtgccatcgtgctggttctgctggcgtgcgccgccgtgtacctgatgtacggcattgcccagccggacgccttctcgccgcgcgccacggcctcgtcgctgttggccgaactgccggggcgcttcctgcccatcggcttcctgagccatatgaagctgtcgttcgtgccgcgtacgccattggcgtccgtggtgtatcagggcgttggcctagtgttctggatcgtggtgctggccgtggtgatgcgatggatgagcgacgtcagtgagtcgaatgaacgggcgcaggcccgtgccgaacggctggttgagaccggcggcgaatcgatgagcttcatgaccacgtgggaaggcaacgactattggctgtcgcccacgggcaaatcggccgtggcatatcgcgtgctcaacggcatcgccttgacctgcaccgggccgttcggcgagccctccgagtggatggacgacctgaccggcttcacccagtattgcgtggagcggtcgctttcgccggtgttctacagcgtgcatcgcgaacagcgcgacgcgttgctggaggccggctggagctccatcgaggtcggcagcgaaatggtcgtggacccgcgcggctggaagacgaccggcaagaaatggcaggatgtgcgcaccgccatcaacaaggccaagcgcgacggcgtgaccgatgtgcagtccacgttcctggaagcgtcgctcgatgtgcgcgagcagatcgaggacatctccgaggagtgggcgcagctcaaggcgctgccggaaatgaagttcacgctcggcggtgtcgaggaactgcgcgacccgcgcgtgcggctgctttacgccatcgacgcggacgggcgcgtgctgggcgtcaccagctggctgcccacctggcgcgacgggcgcatcgtcggctggacgctggacttcatgcgccatcgcaccgacagtcccaacggcattatggagttcctgatcgcgcgcatggccgagcgcctgcgcgacgaggggcttgcggatcctgagcatgccgtggagttcatgagcctgtccgcggcacccttggccggcatgaaccccgagcgagacaatgcccgggaaggtggggtggcggccggcgaaggcacgcaggtgctccaacacgcgctgcagatcgtggccgactggatggaacccgcctacggcttccactcgctgttcaacttcaagcgcaagttccagcccgccgaagcgccggtctacgtgtgctacccggacccggcggcgttgccgcagatcgggctcgcggtggtgcgcgcctacgtgcccagcgtgacgcccgccgaagtggccggcatgctcagtacgctgcggtcgtagggtgcggggcggaccctgacaattgtgctcgcggttgaggctctaggccgtttgcctgttcgttcacgtacggacacggagactgaccgattcgagcccaagatggggctatctgctttcaggaggtacatttggcctcttgcggacagctaactgccttcaaagagatacctaaactctgaaatcccgagtatgagcgttgcaatgacggcgtttgtactcggggtttcccgtattcagtacctctttgaacggagatagcattctgcagaagcccgaatgtacctctttgagcggcgaaagcccagcgagaagggcgcagaaggcgctatctccgtttcgaggggctgatttggcctctccgggaggtctactcccgcttcgaggggctgatggccgagtattcacgctccaaaatcggcggaatggcgttgacgcggatgggcttttacatgcggtctagctgccgaccagccccttgaaacgggagtagacctcctgcgaaggccgaatcagcccctcgaaagcggttttgccgttgcagaggtgtcgttgactgcatcgcgagccgcctcgacgtagtaacgtggggcgcatgagcgaacgtaacgaacacaatgacggcaatacgcaaatcgcatacttcgccggcggctgcttctgggggctggagcgctacttccagaacgtcgacggcgtcacggacaccacggtcggctacgcgcaatccaccgtcgaatcgccgacctacgagcaggcatgcgcgggcggcactgatgcggccgaaaccgtgaaagtcgagtttaacccggcacaggtcagcctgcggacgctgacattgctgttcctggaggtcatcgacccgttctccgtggaccagcagggcgaagaccgcggccggcagtaccgcactggcatgttctacacggacgagacgcagcgcgccgtgtatgtggcggccttggagcagctggtcgaccgccagccgcagcgcccggccgtactggtcgaaccgctgcgcaacttctacccggccgaggcacatcatcaggattatctggtgaacaaccccggcggctactgccatgtaccgatcgccgcaatcgcgaacgtaaaacgccgtcagaagtacgtggaacgcatctgggacctgacgcttgaacagttcgcggtcacgcagaacgccgctaccgagcgcccgttcgtcaacgagtatgacgaggagtttgaacccggcatttacgtggacatcgtcagcggcgagccgctgttctcgtcgcgagacaagttcgattccggctgcggctggcccgcgttctcccgcccgattgccggtgacttgctgaccgagcatgaggaccaccgcattccgggccgcgaccgcatcgaagtgcgcacgtcggacacacagattcacttgggccacgtgttcaccgacggcccggccgaccgcggcggcctgcgctactgcatgaattccgccgccctgcgcttcgtgccgcgctcgcacatggccgaggaaggatacggcgactggattgcggttgtggatggggatgatcaggcatgagcatggagaatatcgcgggcgctcgcaagcccgtcaagcgtgaggatgagcacacggtcgccggcgagcatcgcataattcgccgtgccgcgtgggagcgctgtggcggctacgacgagtcgatgcgcggcgacgccaccgccagtcaagccttcatggcccaccccacctacggcgacggcggaatggccgccgccgtacggttgaggagctgatggtcagccggctaaatgccgatagagctctggatcgattggccgggccaaacgcaggaccgacagggtgaccttcacactgccctgtccggttgcgtcaggcttggtggtgagctgaggattctcaaacgcagcgacgtggccaacgtagtagtacttgccatcggcctcttccgccttgcgcatgacgaatagcgggacgaaatgtgtgtggtcccaattcgggccaatgccgctaagcgcccatcggaattccggagactgcggagtgcgtccgttcttgctgaagtatttcatttcctgtgtgctcaggaattcatcctcgtattggctggccgcgtatttcacgaagatgggcatggtgttggtttccttgtcgagcaggtaaccacccacgttttgcggagtgttttccttcttccatccgcacaggcgcatgacgtcagccatggaatatttgcgctcgtacaagaacatgtggtcgaagacctgttgcctggcggcggcctcgcggaacatatctcggcaattggccataccggtgcgcaaagtgtccgcgaagaagatgcggaacgttcggttcgtggcaagtatgtcggcgaatctgctgctcaaccgatatgcggtgtcgcttcctgtgccggtgctgttcaaggtttcgaccaatggctggttgccaaaacgattgcagttcgggccggtgaaatatgaataatcgagcacgctgatcgcagagtcgaattgcgcgtctgaaccatcggccagcgggaattcagtacgaatcgcatcgagcaattcgctgcggccgattggcgagcccgcactccaatgctgaggtacgtcgtcgtcgagccgttcgctgacgaaatggcatagctgagcaagaatgaccaattcgtgcggtcgcaatccgggcagcagcagctccgctgccatcttgagtatcgcgtcttcaacgtcggtcaccggctccaactgatcctcaaatgtcgcttcatgatgtttgcctttgcccaggcttttttcacgggaacgcacgaaatcaagatagttgctgcgcttcgatgcgatggtatacggcagtgaggggtcgtagttatagatgtccgtaagcatggggatgcggcccagctcgtaacggacttggcgatactgttcggacagctttttcatgtcggaccagtcggcggtgtccaaagacttaaggatgcgctccttggcgatcgggtcgaaactgatggacgacaggccgattgactttcgctgcaggttcttgcgagccctgtcgcggtcgccggtgttgccgtataacgccaccggaatcagatagttgttgttgtaattgccgatgaaatcgataaccacaacgctttctttgtgagggaatttgcgcagtccgcgcccgagctgctgcgtgaagataatgctggattcggtgctgcgcaacatgacgatttggttgacggcgggaatatcgactccctcattgaacatatcgacagtgaagagatagtcgagttcgccttcagtgagcttgcggacgtattcgtctcgctgcgcttgggacacgggcctgccgtcatcgtccgtgctggtaacggcagcggtgcgataggggcgttcatcttgttgattccactgctggttaaacagctgggacagcttatgggcttcctcctgtcggctgcagaacacgagtccggtgaccggaatgttgaactgcccatattcctgcaacttgtcaatgatgtagcggactcgcttttcggtggcaagctgctcgatctcgtacttgagctgtttcgagtccttcgcatcaagacccttggagacatcgagacgatgggcgattccattcggatcgtcgtcggagccaaggtattccgcaacaccgtagtagtggaatggacagagcatgttctcgtccaacgccttttgcaagcgaatttcgtacgcgatgttatgcccgaatagctcgaagatgttgatgccgtcggtgcgctctggcgtggcggtcatgccgagcatgaagtcggcatctttgaaatgattgatgacgcgctgatatccttcggctccagcgtgatgaacttcgtcaaccagaacgtagtcgaattcatcggatttgaattgcgccaaaacctccggctgccgcatcgtctgtaccgtggcgaatacgtagcggcggtcctgttgcttgctggtgcctgaatacaatcccaattcggattcatcacagccgagcaccttttggtaagagttcattgcggtttgaagaatcatctgctgttgggcgatgtacagcatgcgcttcggctggcattcgcgtacgtcgaatgcggaaaggtacgtctttccggtgccggtggccgacacgataattgcacggtgctcgccttgttcacgaagtttcttgagatttgccaacgcctcctgttgcatggcgtttggctgaatgtcatgcccctcaaacgactgcagaatctcatgacgcggtggggcgtatttcttgaaatcttcctcatactgtttgatccactcttcggtcagcggaacggaatcggccacctgtgagtcgatttcatcctggaactgcccgaccagctctccatccgccagcgatgagactttgagattccattcgcgttgcgtggtcaatgcggctccagtgagattggaactgccaacgtacaggtcgtaatagggcgtaccgtctttcatgcggcgagaaaagatatatccctttggatggaatggctgtccttgagccattgcggccactgaggcattgcgggagccttcccacacgcgaacgtcaacaccagtggtgttctgaagatgcagcagctcccagaatgccctgggatcgttgaaatgatttttcgttgaggtaatcagtgtgcccgctcgggtcgctgtttcatggtgacttctgaagtcttcaaataagctgagcacggcctcagccgagacgaatgcgacagaaatgtcgaaggaatcgctagtagccaaggaattgccgatttcctcgcgcatggtcaatccaccggggcgatttgcgatgagggtcggcttatattcgccgggagcatctgagcgcggctcgatcagacctgagatgacatcttcgaggattgagggtgtcgggccaggatcactatgttgcgtgttggccggagagcttgaggtgctggccagattgatagacatgttgtcttgttcccttgcgattcgaattgtttgttgatgactgcatgactgcatggctgcgctatggcgcattcatcggagcgtcagctgtttgctggcgataatcgcgactgcttcgcgatctaccggagcccagttcaatgtcggcatatcggcaggattcagccatcggatatcagtatgctcggtgagatgcggtgtgccggcgatgaggtgacagacgaatgtagtgagccgtacggtcccaaagtcgtaggcgtattcgctggtgcacacttcttccgcgacttcaacttcgcataacagctcttcttcgatttcgcggtgtaaagcctgccgcgctgtttcatgaggttcgattttgccgccggggaattcccagtatccggccaacgacttccccggaccgcgttgtgcacatagtacggtgccgttggtgacgattgcggctcccacgacgttaatgattttgcgttccggatccatgaacaaccaggatacaacgcttcaagatccacaagcgatccacgatcctcgacagtttcgcaagaacgatcctgattcaatcggaactactggaatcgcagtgttctagggcatttgtggaacgaaaagaaaggctgatcaatggtgaatgaacggcagaccgatacgtgtgcggacgtgatgtacaggcgtgaacggcagagaggctgtggcgaagcagggctggacttcgcccctttcattccctcacaggatgaagttgatcagcagatgagcgcattggatgacaagcttgtgtccaaggctcaggaacaatacgcgaaccgagaaatctatcctttggacgagtgctatcagttggacgggtcgacgtttatctcagccgaggcgtttgaagagattcttggcgacgagcaaacgcattatatggcttggaaaaacggctgtattgataagctgtccattgattattgggagatgccggatgtgatggcctatcttgtggagcgcagcattgcggaaggtgacggcggtgaatgctgttatacggatgctcagccgattgattatgcggaagattgtgcgtactcgcccagcgagatgttggagtgcttaggcgccaattggcaagagcagggtgttgccgatgatggtttgagttacgcgttgtacgggcacccgaatatcaatgtcgagaacgtgtccggttcgatgatggtcgtatcgacggagcagcctgggctttcggtgatggttgattatcgcagcggaatttgggtggtccagccgtttgctcatgacgagtcatttgggtctgcgattcagtttggtgagcggcttgcgcccgttgaggctggccttttgtggcccaatgtctatcagcattttttggaggcgaaacacgcatttgattacgcaatcgcgtggattgaagatgttggggaaggcgctctcgactattgtggtagccaagagaagcgatccgtttccgaggtgagattcgggagcgatccgactctcggcagtgattcatctacgcagacaagccaaaggagcctcgccatgattctcgtcaccaccaccccgtccgtcgacggatacaccatcaccaactaccagggcatcgtcttcggcgaagtggtatccggtgtgaacatgttcaaggatcttggcgcgggcctgcgcaacatgttcggcggccgcagccagggctatgaggaggagctgatgcgcgcccgcaacgaggccatcgccgagatgcagcagcgcgcggaggcgatgggcgcgcacgccgtggtcggcgtggacatcgactatgaagtgctcggtgccgacaacggtatgctgatggtcaccgcgtccggcaccgccgtgcagatcgcgcgtacggcctgagctcatcgagcacaggccaaacctgggccagaactcgtccatcaagccgcactctgtcggttatcgtgacgcattacactggcgctcatgaccatacgaatcgaagcatacgaccggctgcccgacgcggcccgcgccatacgcgagcaggtgttcatccgcgaacgcgactggcggccggaattcgatgaatgggatgccgcgtccgtgcatctgctggcgtccgattcggtcgattcgtccgatcgccccggcctgtccgcgcaatcggcctcgtctattcagtccggccagcccgaccagaatcgccccgtggcgacttgccggttctatgcggaccccgaccatcccgaccagcccgggcgatacgtcatcgcgcggctcgcggtgctgaccgaagcgcaaggcaggcacatcggctcgcggctgctgtccgacgccgaacgccgcatcgcgcaagccggcggaaccatggctgccgtgcactcggaaaacgaccactacaagttctacgaacagcgcggctaccggctcactgacgaggtctatgaaggcggtcgtcacggctggctggtcaaggacctatctcgtaacgtatgaaggcccgcctcggtgctgggcgagcgaacctacagcgcgcagacaatcagataaatcgccacgacgtggcaggcatacccgatgaccgtgcccaagtgaaacacctcgtgaaactcgaaccagccggggacgggattcggcttgcgtagcgcaaagcataccgcgccggcgatgatgaggttccagtgcttggcacatacgagaaaaccccggaacgttggaattccaacgtttcccggggtttctccctgcgtgcgagtggggggagttgaacccccacgagcatacactcactgccacctgaagacagcgcgtctaccattccgccacactcgcagacaatcgactaacttacacccggctgggtaatcatgcaatcttcggcgtgtcgcatgggcggcagggatatatcgctcgtgggtcttctgcgggtgccgtgatctttgacggtggcgacactcccctcagtcacttcgtggcggcacaagccgcaacgaaggagaaaaactcacaaccctggccggcgctcgccgttgccgtagaagtgggccagcgcttcgtcgcggaactcatcaaagtatccgccgtcgatcgaggcgcggatgtcgtctagcagcttcacgaagaaatgctcgttgtggatcgtggccaacgtgaacccgttgaactcgcgggcgcgcagcaggtggtcgacgtacgcgcgcgaataatgctggcatgtgtagcagtcgcatccctcctccagcggcccgaaatcgaacttatgctgggcacgcttgatgttgtaccggccggcgcgcgtgtaaatcgcgccgtttcgggcgcagcgtgcgggggccacgcagtcgaaggtgtcgccgccgttctccacgcaggcgaaaatgtcgtccacagaggcgatacccagcacgtggcgtggacggttttccggcatcgcgtcgcagatccatgcacaggtgtcgccgatgatgcgcttctcgatcgcgccgccgatgcccacgccgtcgaagtccagcgaggcgatctgcgaggccgcgcgccggcgtagatcctcgtaattcgcgccctgcaccacgccatacaaggcctgatagggcttgcccagccgctcagccgtcagccgctggtgctcgtccacgcatcggcgggcccagcggaaggtgcgctccaccgagtcctcctggtaggagcgggtgttcatcagcgtggtgagttcgtcgaacgcgaacatgatgtctgcgccgattttgtgctggatgcccatcgaaatctcagcggagaaacgatgtgcgtcaccattcaaaggcgacttgaacgtcacgccgtcctcatccacccaggccatgcgctccttgcccttggcgatgatgtcgtccgacttcatgccggtcacgtccattgccagcgtcttcttgaagccgacgcccagcgacatcacttggaaaccgccagaatcggtgaacgtgggcccatcccagttcatgaaacgcgccaggccgccggccgcgtccagcacgtcctcgcccgggcgctcgaacaggtggaaggcgttggccagcaggcactgtgcgcctagatccttcatctgctcgggcagcacggccttcatcgcggcttgcgtgcccaccggcacgaaggcaggcgtgcgaatatcgccgtggggcgtgtgaatgatgccggtgcggccgtatcgggcaccgtctcgcccaagcccgctggccgtggatggcaggcgggtgatcgtttcgaaatggaaggcgctgcggtcgccgggctgtccgggctgtgcgcccaacggatgttcaagaaggctgatcgtcatatgttcactttaggcagaagggccagaaaagggccggaaattgtgaagaactcggtttcgaggggcggatttcgccgctcccgaacgtctacttccgcttcaaggggctcccggtcaagtaggccggctgcaaaaatggcggaatggcgttaaatgagggcccttgatactcggaattgaccgcgcgaacagccccttgaagtgcaagtagatgttcccgaaacaggaaatcagcccctcgaagccgagatgcccataagactctgcgatgattacgcatagactttcaatcaacgttcagaaaacctccagattgactgcctttactactgaggtagcacacgagaagtggcaatgggcaagtgcccgaatagccgccgaacagacgtgataggaatttaggaaaaggagcagcaatggctgacgaatttaacccgcagggcgtcgaccagaccccgcggaataacgaaaaccccaatagtactgccgataccggcaacgccgagccgaagaacccgtttgtgggtggcgactcggttgatgccggcaacgccagcgattccagcgagcagcaagccccggtttcctcggccgccctcgctgccgatcagcagcctacgcaagccgctaccgagcccatcccggactacgcctccgccaagggcgagagcacggtggtctcctcctcgccggcttctccggcagcaccagccgcaggccagacctcggccacaactccgctgtatcgtccggccccggaatatggcgcttatggtccgaccccgactcaggcacagggccagcagggcggccaggccggcagcaatgcccagcccacgcagcaattcccgttcggtcagcctgcacagcaaaccccacagggccagcagggcaaccgcaatccctactacaccaataacccgcagccgcagggcaacggcaatccgttcaatccgcccacgcagccgcagcagaacaacggcaacccgtttgccagccagtccggtcagaatggccggaatggccagcagccccagcagggcggtctgttcggtttcggcactcccggtaccggtacgccgaacggtcaaggcccggcccagccgggacagcccggtcagcccggccccgccaagcagggcatgtccaagacggcgagcaacatcctcatcgccgtggtcgccgccgttctggctgcggccctctgcctgggcctcggttacggcgccctcaccagcggcctgatcaccttgccgaccagcaattcgctgtccaacgtcagctcgaataagtccggctccgggtccgccaccgccaagagcggcgaagcccccgactggcagaccgtcgccagcgatgtctccggctccgtggtctccatccagaccgcgttgagcaacggcaccgccaagggctccggcgccatcatcgacaccgaaggccacatcatcaccaacaaccacgtgatctccggcgcccagcagattcaggtgacgcttgccaacggcaacatgtattccgccacgctcgtcggcaccgataccaccaccgatcttgcggtcatcaagctcgacaacccgccgagcgacctcaaggccgtgaaattcgccgattccgacaagctcgccgtcggcgagaacgtgatggccatcggcaacccgctcggctacgacgacaccgccaccaccggcatcgtctccgccctgaaccgcccggtgaccgtgaccgacgataacaacaacgagatcgtcaccaacgccgtccagatcgacgcggccatcaaccccggcaactccggcggcccgaccttcaacgcggccggccaggtgatcggtatcaactcgtccatcgcctcgaccgccgcctcatccgactccgccggttcgatcggcatcggcttcgccatcccgtccaacctcgtcaagcgtgtggccgacgaaatcatcaaggacggcaaggtcaagcacgttgccctcggcgtggtcatcaagtccgacacggttgaagccgacggcgtgacccgcggcggcgcgaccatcaccaagtccagcgccactggcagcgcggtcgtctccggcggcccggccgacaaggccggcctcaaggagggcgacaccatcgtggccttcaacggcaacgcggtgaacaacaactactcgctgcttggttacgttcgtgccgcggctttgggagacaaggtgacgctgaccatcgtgcgcgacggcaagaccatgaatgtggacgtgacgctcgatcaggaggagtcgtcggtgaacggttcgtccagctccgattccaacggcaacagccagaataagcagaacaaccagaatggcaatggccagaacggttacggtaacggtaacggcaatggcaacagcgatggcggcaccggtgacggcggcggcttctccgacccattcggcctgtggtaaagccgactcgacaacgtcacacggtgttgggcggtaaccgctgaacaccgtgtcagacaagcaaaggcccgtggcagtgagcaaactcctgccacgggcctttcgtatgcgctattgtgccctgcgcccatgccgccaacgtagtttcgatatccggcatgtcgcgcaacgctcgttgatagggtaggtcaagcactgagttcgggcggtgctccgaacaaagcgcataattcaatacaaaactgaacatttctttacgccgtgtatcggaaggtcgcgcgggagccgagcaaagcggagccccaggcaaagccgccggtgggttaacaaggcgtgaccgcagcgccgattgcgcgggccacgcttgccgtaccgcaatcgactccgtatacgagcgtaaggagcaatgatgggcgcactcatcagattcttcaccaaaattctcgacatctgcaagcttgtgccgatgcttccggtcgtcgtcatcgccgcaattccgctggctttactgggcgattggcgtccgtggggcaatgcgatggcgattccggtacttggcaatccgggcttcggccagtggctggttatcgcattggtgctgattatcgtgattgacactgtgcgcggcatgattgacgatttgcgccacgggcaggtcggggttgatgtgctggccgtggtcgcgatcctctccaccgtggccgtcgccgaatactgggcaagttgggcggtgacgctgatgattacgtccggcgaggccattgaggaatacgcccaagccaaggccgagcgcagtctgaccgcgcttatggaagccgcgccgcagaccgcacacgtcgtcaacctgcctggtgtggggtgtgggtttgctaccgataagggcgattcgtccgatggcttccggcgtgtgggcttggcgtcggctgcggccgccgcgcaccgcttcgacacggtgccggtcgagcaggtgcagctgggcgatgtactcatggtgctgccgggcgaaactgtgccggttgacggtgagctgctgtccggcacggccacgctcgacctgagcaatatcaacggtgagccggtgccgcgtgaagtgttcgccggcgcccgcgtgatgtccggcgcggtgaacggctcgactgcattgaccatgcgtgccacccaggtggccgccgattcgcagtaccagcgcatcctcgagctcgtggcctccgcgcaggagtcgcgcccggccgtggtaaaaaccgccgaccgcttggctgtgccctttaccgtgctctcgctgatgattgccggcatcgcatgggcgatgtccggggtgccgacgcgattcgcccaggtgctggtgctggccacgccctgcccgctgctcatcgccgcaccggtggcgtacatcgccggaaccggacgcctcgccgcagccggcgtgcttatcaaagcgcaggacgtgctggaaaaccttggccgcgtcacgcaggtgttcttcgacaagaccggtacgctcaccgtcaagcagccgcaggtcgtgcgcgtcgagatgctgcccggtgccgcaacccgtctcaacgaagaccatgtgctgatgatggccggcgtggtggaaagctactcggtgcacatcctgtccaaaggcatcgccaaggccggcgcggaggcgctggccggactgcgccagcggttcgaggatggccagcgcctgtgcccagagccggaggccagctggcctggccatggccgggagtatccggtcgtcaagagcatcaatgaagacgccggcaagggcgtttccggcgaggtgaacggacacgcggtgcgcgttggccggctgtctttcgcggctgctggggaggatggattcctggcggtcgatcggactgttcccagtcggtctgaggatgacctgcgcacacgatttgggctacttcagccggacgaaatggcgtcgtatgtgtctgttgatggtcagttgatcgcgcgcattgtgctgcgcgacgtaccgcgtgccaacgccaaggcagcgctcgccaaactgcgtgagttgggcgtcaccgagctcgccatgcttaccggtgacaagcgggcttccgccaatatcattgccagcgaagtcggcattgacgaggttcacgccgaactgttcccggaggataaggtagccgcagtcagggccgctacaggagccggcaaaaccgtcacgatgatggttggtgacggtgtgaacgacgccccggtgctcgctgttgccgatatcggtgtggccatgaccgacggcacatccaccgccgcttccgaaagcgctcaggtagtcattatgaatgacaatatcgccgccgtgccgcgtgccatcgccatcgcacgccgcaccaagcgcgtgatgcttcaggccgtgctcgcgggcctcgtgctcgccaccgtcggcatgattgccgccgcgttcaaccttatcccggtcgtcgtcggtgccttcctccaggaggccatcgacgtggtgagcatcctctgggccctcactgccctaattgatcgggactgattaagaatatgaggcttctgctgtttttgtaggtcagttgactgaccgggatggtcgtatgtcgagtccaccgcatcgaaacataatcggggcgatacggctggtgacgtggcggaaacggaaatcccacccacgaaagcagcaatagcatcggagttattcattaggtcgatttgacgtttattaggtcggtccttggtcggagcggtccttgaaaccccgccgttccaggggatggcttcagcaccctccgacctaatgaacgaagaaatgacctaatgaatgcaatcgaggtcgtaaaaagccgttggaggtgacgtcttcagtgtcatcaagggattcgccggttgtgcagtattgttattgttctgcggcggctctttaccgtcggccttccagccaatcacgggcggaggtgacgcggattccttgtgagacataactatgctcaacccgactggttacgtactgttgctcacacggtataccgagaacattgccaattaaagtgagatgccgagcgaatcggtcatgataggtttgtccggatttgatttctatgagcatacggttgttgggatcggtgaaatccaacaaatccacctcgaccttgctggcatcgcggtagaagaataattgtggctcctgattggcgttcaaatgctgtttcatggtttccgcaatgatgaggttttcaaatatatcgccgaacttggggtgcgcaaccagtgcttcgaccgtccgaatgcccaagagatgacacagcaagccagtgtcataaaaatagagtttcggcgttttgaccacctgtttgcgtgcgttcgtgtagaacggcatgagatggaatgcgatgtaacttgattccagaattgacatccatgcctttacggttcgcggacttacaccaagttcgttggcgatgttggtgtagtttacgagtgctccggaactgagtgcgcaaagagtcaagaatcgacggaagtcagccaaattgcgtacatcaagatattcggaaacatcacgttcgatataagtgtcgatgtagttcgagaagaacagattgagcggcattctcgtgtcgtaaatgcgtggataaccgccttgcagcataaacgtatccggagtaagggcctgatccgccttgcatgcttcttggaatgagaacggcaataacttgaccaaaccgactcggcctgccagtgattgttgaatacgcttgagtagtaggaaattttgagaaccagagagaacatattgtccttgttcgctacgttcgtcggaagccacttgaatcatggagaacaaatcaggagcatattgagcttcatccactatgagtttgggcggacgctgccggatgaatcccaccgggtcgtcaatggcggctttgcgtgtctcaggattttccagattcacgtagtcataatcagggaacatggcttttgccagcgtggatttgccgctttgccgaggcccggtaatagagaccacgggaaaccattgcgcaagttgtttggcctgttttccgagtgcacgtggaatcatcgatgcctctttcccataatccgacattactgattaccataatcttacattagagaaacccataatcctacattaggaaaacccataatctgacattagcagtgctcgtaggtttcccaaacgcacaaactatggcctaatacacagaattcccaccactcgccctctgttgcaacgggaggctttgcgttaggctagagcgcgtgactgaatctgtgaatactgaactccgcattgctgtaattggcgctggtccggccggcgtctactcatccgatatcttcctgcgccagctcaagaagctgggcgaagagctcggcctcggcaccgaagcgcgcatcgacctgttcgagaagctgcccgtgcccttcggcctggtgcgttacggtgtggccccggaccacccgtccatcaagttcatcgcctccgcgcttgagaagacgctcgataacccgaacatccacctctactgcgacgtggaattcggcaaggacgtgactcttgacgacctgctggcccgttacgacgccgtgctgttcgccaccggcgcggtcaaggacaagccgctgaacctgcccggcgccgaccttgaaggtgtgtacggtgccgccaagttcgtcgaatggtacgacggataccccaccggtgcccgcgaatggccgcttacggccgagaacgtcgccgtgatcggcggcggcaacgtggccatggacgtggcccgcgaactcatgcgcaacgccgacgacctcaaggccaagaccgacattccggacaacgtgtacgagggcatcggccagaacaaggccaaggtgctccacctgttcatccgccgtggcgtggcccaggccaagttcagcgtgcaggaactgcgcgagatggagaagctgcccggcgtgcagctcatcatcaacgaggacgacttcgatctggacgacgagaccatcgaggtggccggcaaggacaagctcacccgccagatggttgaggagctgttcgccgtccgcgagatggccgaagacatggaagacgacggcgacgtcgacttcgaaggcaacccggccgaccgcaagtactacgtgcacttcaactccgcccccaccgagattctcggcgaggacggcaaggtcaaggccatccgcgtggagcgcaccgaaaccggtgccgacggcaagatgcaccgcaccggcgagttcaccgactacccggttgaggccgtctaccacgccatcggctaccagcccgccgaagcccccggcattgcctacgacgagcacggcgcccacctggccaacgccaacggcgacggccgcatcaccaccgaggccgacggcggcgaagtgcgcgaccgcctgtatgccaccggttgggccaagcgcggcccggtgggcctgatcggctccaccaagtccgatgcgctcgccatcgtgaccaacatgctcgaggatctggccaaggccgctgaaggtggccgtgtggcagccgaccgcgaccccgaatccatcgaccgactgctggccgagcgcggcattcgcccgatcgacttcgccggctggaagaaggtcgacgctttcgagcgcgccgagggtgccaaggaaggccgcgagcacaagaaggtcatcgagcccgaccagatgcgcgagctcgcccacgcctgacggcccgcccacgcccgtccggcattcgtccggcattcgtccggcattcgtccacccggccgcgccccgtgcggacgcggccgggctcggggccggacgggccgggcgaatatgggacatttctcgcggcgcatatccagcaatcattcagcatgcgattttagtgtgtgcattatggatgccaaagtacgggtgcacggccatttcaacggcctgaagacaacgctgctgtttgccctgatgtgggccatcatcatgctgatttggtgggccacgggcggcagtcggcaaaccctgagcatctatatcgtcatcggcctgattaccacgttcggcacctactggttctccgacaaactcgccatcgcctccatgggtgcgcgggaagtcagcgaacaggaagccccggaaatctaccagatcgtgcgtgaactgagcgccaaggccggcaagccgatgccgcgcatctacatcgcccccaccatgagcccgaacgccttcgccaccggacgcaacgaacggcacgcggctgtctgctgcacccaaggcatcctgcagattctcaacgcccgtgaactgcgtggtgtgctgggccacgaacttatgcacgtgtacaaccacgacatcctgacttccgccatcgcctctgccatggccactgtcatctcctatctgggctattcgctgatgtatttcggtggcggctcgcgagacgaccgcgatagttccggtggcctcggcctgatcggcgcattgctgagcgtgattctcgcgccgattgccgcgtctttgatccagatggccatctcccgcacccgcgaatacgacgccgatgaagacggcagcttgctcaccggcgatcccgaggccctggcttccgcgctgaacaagatttcctacggcgcacagaccgcgccgatgcgcaaaaccgccggcacccagtccgtctccgcaatgatgatcgccaacccgttctccgcggtcggtttctcgcgcttgttctccacgcacccgccgaccgatgagcgcatagcgcgtctcatgcagatggccaacgaaatgaacggcacgccgatcgctccgcccacctactccacgcgcgtcggcaggtgacgtgctaggataactattcgtgcctcgtttggctgagcatgctcgtcacgtgaggtgcagcagccgtaaggcatgcggacatagttcatcggtagaatgaaagcttcccaagctttagaggcgggttcgactcccgttgtccgctccattgattttcaatgattttcattatttccgggaaagtgtcgcgcacgatcgcaaaactacgcgctatttgagcgctttgcccgcggaacccagctgccggcaagcctcgaccacgcgggcggacatggaatcctcagccttacggccccaagaacgcggatcgtagaacttcttctcgcccacttcgccgtcgatcttcagcaccttgtcgtagttctcgaacacgtggtcggcgattggacgggtgaaggcgtactgggtatcggtgtcgatgttcatcttgatcacgccgtagcttacagcttcggcgatttcttccgggcgtgaaccggagccgccgtggaacaccagctcaaacggcttgccgttggggaaatcgactatgccggccgcgctaggcaactcgccttcggccaccgcgcgcgccacacgcgcctgaatgtcgccgagtagcgacggacgcagcttgaccacgccgggcttgtaggcaccatgcacattgccgaatgtgaaagcggccatgtaccggccacgttcgcccaaacccagtcggcgggcgacttcgaggccatcttccggagtggaatacagcttttcattgatttcggcggagtgaccgtcttcctcaccgccgaccgcgccgatttcgatttcgagcacggtgtgcgccttctgcgacttgtcgagcagttcctcggcgatgtccagattttccttgagcggcacggtggagccatcccacatatgcgactggaatgtaggctcctggcctcgtgccacctgatcggcctcatgcgcgagcagaggacgcacccactcatccagatactgcttggcgcagtgatcggtgtgcagagcgatggtgatgttcgggtatttcgcagccacttcatgtgcgaaagccgccagcgccagcgagccggtaacgcgatcattgacccccctgccggagacgtaggccgcgcctcccacggaaatctggatgatgccgtcggactcggcgtctgcgaagcccttcaacgcagcattcagtgtctgtgagctggttacgttgatggctggataggcgtaaccgcctcggcgggcggcctcgagcatttcggcatagcgttccggtgttgcgatcgtcatggcttcattatcgcgcgaggcatgccctctaggctccgttcttcaacctgtgcgctgtgcgattggtcacagcatcgcctcgtacgagtagaaattcgtcacccattccgggttgtcgcacctccagcctcgccctgcgtgagacgaaacttcgcagggtagagggtgtacggtagtctgtttccggcggaatcgtgcgaatgcggaggtgcatcatgcctggaattgttcttattggtgctcagtggggcgacgagggtaaaggcaaggctaccgatctgatcggcaccaaggtcgattacgtcgcgcgcttcaacggcggcaacaacgcgggccatagcgtggtggtcggcgacgagtcgtacgccctgcacctgctgccctccggcatcatcaacccgaacctgaccccggtgatcggcaacggcgtggtcgtggacccggaagtgctcttcgaggagattgacggcctggaatcccgcggcatcgattgctcccacctcaaggtgagcgaggccgcacacatcatcgcgccctaccaccgcacactcgacaaggtgactgaacgcttccttggcaagcacaagatcggcaccaccggccgtggcatcggcccagcctacgcggacaagatcaaccgtgtcggcatccgcgtgcatgacctgttcaacgccgaccatctgcacgacaaggtggaggccagcctgcaccagaagaaccagatgctggtcaagctctacaaccgtcgtccgatcgacgtggaccagaccaccgaggagctgctgaagctcggcgaacgcctcaagccgtacgtggccaacaccggcctgattctcaacaaggcgcttgacgaaggcaagaccgtactgtttgaaggcgctcaggccaccatgcttgacgtggaccacggcacctacccgttcgtcacctcttccaacccgaccgccggcggcgcctgcaccggcaccggtgtgggccccaccaagatcacccgcgtaatcggcgtctccaaggcctacgtcacccgcgtgggcgaaggcccattccccaccgaactgctggacgagtccggcgaatggctgcgtcagcagggccacgagttcggcgtgaccaccggccgcccgcgtcgctgtggttggttcgatgcagtcgtcaaccggtacgcctcccaggtcaacggcctgaccgacatcgtgctcaccaagctcgacgtgctcaccggtctgaaggagattccgatctgcgtggcctacgacgtggacggcgaacgtcacgacgatatgccgaccgatcaggccgctttcgccgcagccaagccgatttacgagaccatgcccggctgggatgaagacatctccgactgccactccttcgatgagctgcccgccacctgccaggcctacgtcaagcgtttggaagagctgagcggctgccgtatctccgtgatcggcaccggcccacagcgcgaccatgtcatccagatcaattcgctggtcgactgaccgtctgcaacgaatttcccggcttgactggtaacgacgcggcacatgatatccgccggctgattccgcgattcgaccacttgaagtggaagatggcggcggccggcatagtcattggtctggtttcaggattgctggttgtcgtataccgtctcggcatcgaatacggcacggatgcgtcccgttggatatatgcgcggattcgcgagaccccgtggctgattgcgccgtgggcggttgccgcggtggcggccgcgctggcgatcgcgtggatggtcggcaaggagccgatggctggtggcagcggcatcccgcagaccaatggcgtggtgatatgcggcttgaagatgcgttggcagacgattctgccagtccgtttcgtcggtggactgttgggcgcgttgtttggtctgtcgctcggccgtgaggggccgtccattcagattggtgcgtcgggcgcgcagtgtgtatcccaccgtttgcgcggccgccgccgtgaggacatgcaggagcattatctggtcaccgccggtgccgcggccggcttgtccgccgcgttcagcgcgccgctgtccggcatgatgttcgctttggaaggggtgcatcggagtttttcccctgcgattctgatgggcgccaccgccgcatcgctgaccgccgatttcgtctcaaaatactgtttcggtctgcgtccggttttggatttcggtgatatcggtcagctgtcgttggaagagtatgtgtggctgattccgttgggattggtggccggtttggttggttcgctgatgaaccgctcgttgcttggcttccagacgctgtacggcaaactgccggcatggagccgcccgatgattgcgattgcgatcgcgttgcctgtcggcatctggttgcccgatgtgctcggcggcggctcgaatctgattgataccgccgaacatgcgcgcgtcggcttgggaatgctgtgtctgctgttcgtggcgaagatgctgttcacatccacgagtttcggctcaggcgcgcctggcggtattttcatgccgattcttgcggtcggttcgttggccggcggcatctgcggtgaagtgttgcatcgattcggtgatctgccatccgacgcagtggcggtgtttgcggtgtgcgtgatgacgggcacgctcgccgcgtccgtgaaaacgccgatcacgtcgattctgttggctgtggagatgtctggaacgttgacgcacatgctgccggtcgcggccgtcgctttcgtcgcgctgttggtgtccgatttgctgcgcaccaaaccgatttatggggagttgctggagcggtacgtgcgcgcgcaaggcatgcagatggcgatcgcaagccatgtgggcagcggcattatggaactgccattggaaatgggagcgattgcggacggcaagcgggtgcgtgacgtgcgttggccgtctgggtgcctgatcatcggcctgcgtcgcggcgaaagcgagatcgtgccgcgcggcgatacacggctgcgtgccggcgactatctggtggtgctgttcagtggcgaggaggagcgcgaggtgcgacctgcgatgcggcggctgtgtgatgcccggcttgactgagcctggctgaattcggctggactctggatgtacgaatctgcggaatcggacatccagggtgcatacgttggcgctccgtgtaaactcatatgcgttaggaaggcggcaaccgcggcccagctcgttgttgcacggcctatgggcggaacaacgctgtccgcggaaggccagtacagggggagcgcaatggaatcgcaagaacaatcgccgggagacgtggtgactgcgggtgaggactcgcatcccatcacgcaggcaatcgacactgttgaggtgacgcatgctggtgcaaccgcgcccgccgctaacaccatgaatccgcctacgattcccctggcaccgatgaaacgtatgcaggcgcggttcaatccgctcgccgacggactgatgtatgttgtggtgttcgtcggtggatttgttggagtcggctgtcggcatgcgttggatatgctcctgccgtcggtcagcggggcgccattcgttgtgggcacgtttgtgtcgaatatggtcgcctgcttcctgttcgcgatgctgaccgaattcatggcgaccgcttcgtggctgcgtcgccgggtgcggcaggttgtcagccgtggtgttgggctcggcttgctcggtgggctttcgacgatgtccggcgtgatgctggaaacgatggaaggtctgcacgagcggcatatcgccagtgcgcttggctatcttgcgggaaattttgcaggcggtttgctcactgccgccgccggcgtggttctgatgcaggcactgctgtcacggagtactcgaaagcgggttcggggtgcgttttcagctgtttccgtgtccgattctgccgaatcggacacgcagggcgtacgccatgtgaaagtggccgacgtggcgcgttctgccgcgcaggccgcaatggaagccgcgcaggcggcgcagcaggccgcgcagacggcccagcagattgcacagacgggacaggttccgcgagtcgaaacgccaaccgtgccgccgactgccatccagcctatgcagacaggccacgttccgcagattcctccgctggtcgttcctcagctgacacagtcatcgcagccgttgttgcgcgagccggatacttcagacttggggcagctgcccgagccgattcagcagtcgcaaccaatccagcagccccagcagcagtcgcagccaatccagcagccggccaacccgcttccacccagcttcgagcccaaaccgatcactgcggagatttcgcttgtcgccgacccgactaccggggaggtgcgctgatgatgtggatgatctgtctgttcggcggtctgggagccatggcccgttacgtgctcgacgtgtcaattcaacgaggctggaaccgcgagaatcgaagaacgaaccgcaacttcccgctatccacgctcgtcatcaacggcgtcgcctcgctatgcgcgggcatcgccatgatgtcctactattcgcaatcggtggatatggacacggtcatgatgttcgttgtcggatttctcggtggtttctcaacattctccacggcgctcaacgaagtggtttcattgattcgccagcgtcgttttacgctggctctgggctatggaatagcaaccgtcgcggtgcctctcatttgcgtggccgccggtttcggcattgcgctgcttgccaatccggcgtaattttcacgttacacggacggtcgctgagtaacgtgaaagaaatctgagcgccaccgccatcaaggccgccagtccggatgcaacgctggtgattgcattcgaccagaccaagccgctgctgaaggccttcacctccgcaggagtcgacactaagaagctgtatttcgttgccggactgtcgaacaggttcgagagaatgtaaatgaatgtaatatttcgtggtaagcacgtgagcatacaacgatagaacagtgataacggggaaggtgcgatcatggtcggcatgcgcgatgtggcgaagaaggccggggtgtctctgagcaccgtctcgctggtggtgaacggcaacgggtacgtgtctgatgacatgcgcgaacgtgtgcgcaaagccatgcaagccctcaattatgtgccgaacgagcttgcccgcaatctgtatcatgattgcacgaatctggtcggcgtcatcgtgcctaccatccgccacccgttctttgcgacgtttaccgcacatctgcagcatgcactcgccgcgcaaggattacgcactatgctgtgctctaccgcagatgaggcggatggcgaaatccagtatgtcgacatgttgcgtcggcacatgatggacggcatcgtcatgtgtgcgcacacttcgcatcccggcgattattggacgtcgattcatcgcccgatcgtcgcgttcgaccgtgtgcttggagacggtatttcgtcaatcggatccgaccacgagcagggtgggcgattgattgcgcagatgctgatccgcaatggtgccaaacatgtggtgatgattggcggtccgcgagatcaattcttcgatttggctgcgcgcggagaagtcgaggaaggaccgttcgatttgggaaagaccacgttcccgacggtgcgctactacctcacgttggaacaggaattgacctccgcaggcgtgaaatacgagtatgttgaagctggcgaagtgatggattttgccggctatcatcgtgcggtcagcaatgcgctcgacaaggtgacgaccgacggcgtcgatgccgtggtcagttccgatattggtgcatcgttctgcgtgcgcgaagcgttgggccgtggaatttccattcctgacgagctgcagatcgttgcctacgatggtacgtatttgactgatttggccggcatgaagctgaccgcggtcgcgcaggatttctcggcgatcgcacagtcggcggccgaccatatcgtgcaggcgattgccaatgaggaagtggccgcggctaacgcttcacgcaagaacatccccaagccgttcgagccgaacgtgcttattcccatgacactggtgccaggcgataccacgcgttgatactgtgcgtcttcatgcgtgtgcccggtgtggatcgcatcgatttcagcggcgtccacaaccggcgaacgcccgtcgatagtcgtgctcatcatccgacttgtgcacatgtgtccgattctgccgaatcggacgtctgagttccgaaaaatgtgttctgtgtgtccgattctggagaatcggtcatgtgtgatgtgaattgggatgtttggatgtccgtttctgcagaatcatctttgctctgtactcgttgattcgcaaatacggcgcatggctcgtcataccggccatgctcggcggcgcggccttcctggcggactcggtgctgacgccggccgtgtcgatctcgtccgccgtcgaaggcctgaagacgctgccggcgttggagcatctgttcaccgagaacaaggatctgacgatgatgatcaccgcggtgatcatcgtgatcctgttcgccgtgcagtcgcgcggcaccgaatcgatcggcaaggtcttcggctcggtggtgatggtctggttcgcgttcctggcgatcgtcggcgtggtagccatcggcaacgactggtccgtgctcgccgcactcaacccgtactacggcatcaagttcctgttcagtccgaataacgccaccggtctggcgctgatgggcaccgtgttcctttcgaccaccggcgccgaggcgctgtactcggatatgggccacgtgggccgcggcaacatctacttcacctggccgttcatcaaggtggcgctggtgctcaactacttcggccagggcgcgtggatgctgcgcaaccagaacaaccccgaactggccgacgccgaggggatcaacccgttcttccagatgatggatccgaacgtgcgctatgtggccgtcgtgctgtcggtcaccgccggcatcatcgcctcccaggcgctgattacgggcgcgttcaccatggtctccgaggccaccggcctcaactggatgccgcatctgcaggtctgttaccctgcccgtacccgcggccagctgtacattccggtcgtcaacgtggtgctgtgcgtggccacgctggccgtgctgctgctgttccgcgattcggaacatatctcggcggcctacggcttggcactgaccatcacgatgatcaccaccacgatcctgctgggcatctacctgtggcaccgcagcaacaagttcggcgccgttgtgttcaccatcgtgttcctggcgatccaggtcctgttcttcgccgcctcgatggccaagttcctgcacggcggctggttcacgctgctgctcacgctggcgatcctcatgatcatgtacacgtggaacgagggcaccaagctggagcgctcgcagcgtcggcacatgatgccgaaggacttcctccccgcgctggacaagctgcacggcgatagccgcatccaccggttcgcggacaacatcgtctacctgaccagcgatccggacctgaagcgtctcgatacggacatcttcttctcgatcttcgccgaccaccccaagcgcgcccgcgcatggtgggcggtggccgtcgagaccaccgacgagccgttcacccgtgagtattcggtcgagagcttcggtaccgactacctgttccgtgtgcgcatccgcctcggcttcaaggtctcgcagtccatcccggcctacctgcatcagatcatgcacgatctggagaagaccggcgagctgccgaaccagcagtcgatctacccgaagcttgacgccgatcccggcatcggcaccatccgctacgtggtgatccacaaggcgctgatgcccgagtcgaaggtctccggccgtggcgccctctcgctgcagatcaagtacgcgatccgccgcgtggccggttccccggtcaagtggttcggcctggcgccgtacaacccgctggtcgaggtgcagccgctgttcgtgtccacgcgccgcccgccgcgcctgacccgcgtggccagccaggcgcccaagcgcgagggctgagccggcaggccgaacagccggtgcgagccgggtggcctaatggcatgtcagggggccgcgaaccgtcatcgtacggttcgcggcctttgcatatgcgaatgatgcagagtgggcggtactgcttgtgaatgtagcgggtggacgggtgacgtggttgatgccttttgccgtatgttcacggtggctatgcgtcggatgggactgtaattcgacttcttgggatcttttttgctgcagtggtgcgccaaaaggtctcagccgtctctgcgccacgccttccggcagtcagtacaaggttgtactacactggtggctgtcgcacggatgtccccggtcgcccgcgcctccgcggtacatcgttgtatggatacgtgtcacgtatgcagagtgcatgcagatatgtagaaaggaatcccatgccccagcaggaccatctgaccgcacgtctcgtcgtcgatgacgattttgaggtcgctccggtcaacaatcgtctgttcggttcgttcgtcgagcaccttggccgttgcgtgtacaccggcatctacgagcccgaccacccgaccgccgacgagcacggcttccgcaaggacgtcatcgacctggtcaaggaactcggcgccaccaccatccgctacccgggcggcaacttcgtgtccggctaccgctgggaggacggcatcggccccaagcaggaacgtccccgtcgactcgatctggcctggcattccaccgaaaccaacgaattcggcctgcacgagatggccgaatggcttgaggccaccggcggcaacgagctgatggaggccgtcaacctgggcacgcgcggcctgcaggaggccctggacctgctggagtacgcgaacgtgcccggcggcaccgagctgtcggaacgtcgccgcgccaacggcgccgacaagccgttcgatatccgcatgtggtgcctgggcaacgagatggacggcccgtggcagctcggccacaagtccgccgaggactacggcatgctcgccgcctccgtggccgccggcatgcgccagatcgatccggacgtggaactggtggtgtgcggctcctccgcccatggcatgccgaccttcggcaagtgggagcagaccgttcttgagaagacctacgagaacgtgaacttcgtctcctgccacgcctactaccagccgttcttcaaggaggacggcacgcgcgacatggccagcttcctggcctccggcgtggatatggacggcttcatcaaggacgtggccgccaccatcgacgccaccaaggcccatctgaagagcgcgcacgacgtgtacatctcgttcgatgaatggaatgtctggtaccagggtgaggagccgagcaagacccccgagggcatcggcaactggccggtggccccgcgtctgctggaggacatctacaccgccgccgacgccgtggtgttcggcgatctgatgatcacgctgctcaagaacgccgaccgcgtgcgcgccgccagcctggcgcagctggtcaatgtcatcgccccgatcatgacggagccgggcggcccggcctggcgccagaccacgttccacccgttctccgtgaccgcgcgcctggccaagggcggcaccgtgctggagccgaagctgtccgccggcaccgtggatacgccgcgctatggcgaggtcgacggcgtgaacgccgtggccgtgcgctgcgccgacggctcgctcgccgtgtttgcggtgaaccgttcgctcgaggcgaccgccgagttcgagatcaggctgcaggacggcgcgcagccggcatccgtcgaggcgcagacgctgcacgacgacgatctgttcgccgcgaatacgctctacgaccagaaccgtgtgaccccgcacgccaacgggtcggccatgtacgatgccgagtccggcgtggtccgcgtctccctgccgccggtgagttggaccgccctgcacatcaagtgacgcgatgggccgcgcggtccgttccggagaaggacggatcgcacggcccttgcttcccgggccgggcggaagggaccggaccggccggggaaaacgcgttatgctggaatcagacgggcgttccgcctgaaccgtgcggaacatgcccgatggtgcgacgagaggggtgctgtggcgaaacgggtgaccatcaccgacgtggcgcgcgagacgggcgtctccatcaaaacggtgtcgaatgtgctgaacaacaccggcagtatgcgcccggagacgcgccagcgtgtccaggatgccatcgaacgcctcggataccgcgttaacgtgtccgcccgcgccatgaaaaccggcggcacgaagctcatcggactggccatcaccgatttctgccagccgttcatgccctatctcgccgacagcatcgtggcggcggcacgttcccgcgggtacgcggtgatcaccgatacctacaacagcgccggcggcttggcgcaggcgatcccggagacgaagaagctggccgcggacggctggattttcttcatgggctcgccgatcacggatcgcacgatactgcaccagccgtatccgttggtgattgtgggcgattacgatacgcagggactggccgattgggtcacgatgccgaacgtggaggccgtacgcaccgcggtgggggcgctgctggattcgggatgccgtaggatcgcgttgatcggcggcaccgcggagaacgcatgcccggatgccgaccgcgagtcgcggcccgaaaccaccagcacgatgcgtacccgcggctatgtgttggcccatgaggagcgtggcctgcaggtcgattggcggctggtccgtaacgcggattgggtgcagtccggcggccgcgatgcggtggcggggctgttggacgatccggatgcgccgcgtccggatgcggtcatgtgcctgaacgacgcgctcgccatcggggtgattcatgagctgcagcggcgcggcgtgcgcgtgccgcaggatatgcaggtcattgggttcgacaacgtgccggatgccgagtactgcatgcccggattgacgacgatcgacccgcatgtggatgattacgcgcgacatgccgtggatatgctgatcgcgcgcatcgaggggtcggcggatccgttccgcacgtatgtgacctcctacgatctggtgcgtcgtgcctcgacgtgttgacggcccggcgttcgcctggacatgggtctgtgacgggctgctgtcgcctctcccgtggcgtattccgggagaggcgacatgcgggctaggatcggagcagcacctccgtcagcgcttgacggacggcgctcggcatatgcgaatcggagcaatcttccatgtccggcccgctgacgtgctcgagtgaatccatcgtggccaatgcgtcgatgccgttctccgctatggcggcataagcctgttccttggtcagatatcgcatttcggcatgccgaaggatgtcgaagacgtcttccatgcggggatcggcggccatcgtcgtgtcgccgatggtgacacgtatctcgctgcgggtggatacgtcggcgaccgttacctgcaatgtgagggtttcggcatcataccggcgatccgaatcgacggatgcgccgtcagcctgtacggatatgtcgctgtcggtaatgcctcggaacaggaaatcccatgttctccgggccggcagagcgtgaacgtctccctgggctggcgataccgtgagtgcggatgtggcgccgtccttgcgccatcgataggtgatcgcggtggtcgccggggtgatctgccgagagtaatgtcccgaatcctccatcagcgtgaagtcgccgtccgctccggggaagacgatgatctccagatgctgcgggttgtcgacggagttgatggaatccccctcggacaggggctgcatcggcacgatgccgccggccttcgcgaacacgggaattccgtcgagcggacgccagacggtcatgcgccgtccgttgggcgaagacgcgctataccggcgcccggtgaagaagtcgaaccagtcgccctgcggcagccatacgtcggccttgccccgtcgggaggatttatccatcggttccgtgatgggcgcggccagcagttcggtgccgaacatgtattcgttgggaacgtggtatgcggcgtcgatgtcgggcgatccccaatacatgggctccaccaggggaaggcctgtccgggatgcgcgccagttcatggtgtggaggtacggaatcatgcgatggcgcaggcggagcgcatcgtccatgatcgcacggagggggtgcggatgtttttttggacggtcaggcggccagtccaagacttctgcggtattgcacggggctcatccagtccagtgacttcttgatcctggtttcattgtagtgggtcaggtaggcggccaggcgttcgcggaactcctcgtagcccacgcccctccagtcccgcccgtagaataactcgttcttgagcctgccgaagaacccctccgcggccgcgttgtccgggctgcatcccttggcgctcatcgaccgggtcagcccgtgctcggtgcagatgcggatccattccggccaccggtaatggcaacccctgtcactgttaaaccgacatcggtttaactcggattaagccggttttgttgttaagccggggaacggttcggggtcttggtggctggccgtgtcccatgtggtttcccggcttaacgttccgggttatttgagggtgtgtagttgtcggagtcgttgctcgctgagccatgtctccttggaggggtcggggccggggttggccgcatcgacggctttgcgcatcatgtcgagggtcgcgaacgcgtagaacgcgctggttgtgctcatgctttcgtggccgagcagttgcatgatgagcggtagcggcacgccctgttggtagaggtccatggcgcgggtccggcggatcaggtggcagtggacgcgttcgggcatggacgggcacgtcccgcggcgtgctctggccgccgcggttttgaggatctcgtcgatccggtccacggagagcggctggatggcgccgttcctcgtcgagtggaacaacggcctgtcgccgtcgcgcatggacggtccgggatggaattcctcgaggtaggcggccaggtgggttcgtgtcctttctcccaggggcacgacccggctcttgccgcgtttgccggtgagcgtgaccctggccggcttatccatacccacgtccgcgatggtcagtgcggcgagttcgccgatcctggcggcggtgtcgtacatgaggatcaggagcatgcggttcctgcgcgatttggcgtcgccggtgccccatgcggtcagcaacgctttggcgtgctcctccccgaggtggtcgacgggtttgcgcgcgggtggtttgacacgtatgccggccgcgtcgttgcccagcgcggtcaatgccgggtgttcgaggcccgcgtggtcgaggaacacgcgcatcgtcgtcatcctcagcatgatggtgcggtccgagtacccgcgctcggtccgcatccattcgacccaccggcccaggcgcgcccggtcgaaatgcccgaaaccgatgtggctgcgctgcgtgccttccgtggtttcgagccatcggacgtaggattccaggccgatgcggtacgcctcgacggtcttcggcgagctgccccgcaccttgggcagccagtggtgcagccagtcgcgcgcgactcgccagaagtccggttcaccggagctggcggccgttttccttgccttgctcatggttcctccgtttccgggaccacgcgttcggcgtcggcgacgaggtccgcgtatccgtccatgaaatcggggctggcgtgcacgtagtagagggtgctgtcgatgccggcgtgtcccatgtaggccgccagatagggcagcatcgccatcacgtccacgccgtcgcgagtccaccgctcgatgttcgcgaacgcgaaccggtgccggaaatcatagggcctgggccgtttgccggcttgtggccactcgagcccggcacgcgtccagacgcggcggaacaccacgccgggcatgcccggggagaccggattgccggtggaggtgacgaagaacgcgggacggtcgtctccgaagcgttcgcgggaccgttggtcgcattccagcagttcggcggcgacctcgtcgcccacgggcagcctgcggctgcgaccggccttggaatcgaccacgtcgatggaacgggccttgtggtcgacgtgcccgacggcgagtctcctgacctctcgggtgcgcagcccgcagcaggccatgagcatgaagaacgcgcgagactgccacgcccacggcgacggagactccaacgttcccgcggcccgcaggaacagggcggcctcgcggtccgtcagcaggtacggcgtcggacgcggggatccggccttccactggtcggagagcacgtacgcgtcgggatcgtgggccagtcgcatccacctgccgaagtccctgatgtacgagaaccacgagcggcaacccccgggattcgcgtcgatcctatgggcgatccatcgctccacgacgccccgctccagacgcacggccccgtgttcgaggcaatgccggtcgaacgagcgcaggacccggacgcgggtggcgccatgcctgcccatggacgccttgaagcggatgtactcctccaattcgccggcgagcgggccgacgaatccgtgttccgtgggtctcatgacgatccgccttccggcacgggcagcacgcacgcgagcattcccccgcggtgcgtggccatgtagacgcgtgtggaatcggggtcggcgtggccaagcaccgcgctgatcgtcggcaacggcgtggccgcctccagcatcctcgtcgccgcgttgcgccgcaacagcctggaaccgccccggcgtccgagcccggcgtgccgcatgacacggctgatcgcctcgtacaccgatgaatgaccccgaagcgcgacatggggcgccttgtaccgcacgaacacacggtcgtcgtcggtggcgggcctttcgtccaacagccaggacgccagcctcgcggccagcggtcccgtcatcggcacggtcaacggattgcccgtctttcgctgcaccagacctatgctcatggaatcccaatccacgtcggcgatcctcagaccgatcacatcgcatgccctcagcccgcacgtcagcgacagcagggtgatcgccgcgtccctcgacggcaccgaccgcgaggcgcacgcctccagcaagcggcggtgctcgtcgtcgggcaacgttcccgcgatcgcgtgggtcctgcgtatgccggccaggccgatcgcgtccgccaggtcatcccgcccgagccatctgaacaacgggcgcaggtccgacgcggcgtgccgcatcgacgactccgaccagcgtgaacgcagcccggccaggaaccccagcacatgcgagccatccgaaccgtccaacgacacgaccccatgagattccagccacgtgaggaacaagcccgccatccgacggtaatgccccaccgtcgccgaagccagtcccgaaccggcgagatacgcctcccaacgctccatgaccacggccaaacccggaaccaccggctccgcaagcctgctcctgcgccacttgcccaggtccaccgaaccggaccgcagatacgagtcgcacaaacgcgccagcctgccgtaatcgaaccaccgctgcctgctgaaaccgcccgtccgctcactgaaggtcgacgcggcgaaccccgcgcccaacccacgcgtgtacaccgcatccgggcctccggcgtaccgttccaacgccctgatggacttgcggtactggcctatggtggattccatataaccggccccgtaaagcgcgcggaccacctcgcccgcgacatggccaaccgtcgtctcacccatggcaaactccttcgttcgaatcaaatgggacaagacgaacataacccggaacgttaagccgggaaaccacatgggacacggccagccaccaagaccccgaaccgttccccggcttaacaacaaacccggcttaatcggaatggatgattggatgttccccgtccctgagcgtggcgaccgcgtcaaggagcatccggttcgccatgtcggcgttcggggagcgcgacaaggtccaggagaccaccatcccgtcgaagcagtcgaccaccggggaaagccagcacttgtacccgtccatggtgaactgggtgacgtccgtgacccacagcatgttcggcgcgtcggcgtggaagtcccgctccacgaggttcgccggggcctcgccgatctcgccggcgtaggagctccaccgcttcggccgcttcaggtacacgggccgcatggccccctcgcgcatgatccgcctgacgaccttctccgagacgacgatcgggtcggactcgtcaaggcgcagcatgcggtggatggtccggtatccccatgcgcgcccaccctgctcgaacaggccggcgacgcgggcccgcagcacggcgtacctgtcgcccgcggcgatcgcgccgcgctcgtaatagtaggtgctgcgtttcagccccacggccttcagacaggccgccaggccgaattcacccctgatcgcgtcgacgacccgcgtcctctccctgttcgtcagcatggacgggtcgaggcgcgggtcgtcggcttttaaaacatcgatcgtctcccgcatcaccgcgttctccagccgcaggacctccacctgccggcgcagctcctccacgtcatcgccggccgcgggcatcggttcggccggcatcggcgcgtttctcctgtccatcagtcccagtatcccctcgctccggtagcggcgcatccactggtacacgctcgtcggcgtgcaacccgcgtcgcgcgccacgcgggcgaggggctcgccctcgagcgcgcgtctggccgcattcgtcttgcattccagcgtatacgaacgcctgcacgcgcccgtgatctcgtcggcctccgcgtccagcatcgcgttcaacagctgttcgaccttctccgacaccaaccggtccagcttcgtctcgagcatgttctcgtcgacctgtagaatctgattcggcatggttccgtcgccttcctaaataggttgatttggtttggcgactgaaatcgtacccggacgacggaccatgtctctcaactcaagcctcaaccaaaatgcgcaacaaaccgggcgttatcaatcggacacattggagtcggacaggctaagctgcatagaacaccgcatctaatcggttcgacacgcgcatttcactgcgcgactggacattgacgtccctttcgaggtaatatcgaaccggttcgatacatacgtgagtatgcaaatacgtaaacaacaaacaggcagatgcgcacgcaaattgcacccgcgcccatgagccaagggaggtcccatgaaaaacaaagtgcaactcatcacatacgccgatcgtctcggcgatggcactcttagctcgatgaccgacatcctgcgcacccgcttcaacggcgtgtatgacggcgttcatatcctgccgttcttcaccccgtttgacggcgcggacgccggcttcgacccgatcgaccacaccaaggtcgacccgcgcctcggctcgtgggatgacgtcgccgaactctccacaacccacgacatcatggtcgacgccatcgtcaaccacatgagctgggaatccgcccaattccaggacgtgctgaagaacggcgagaactccgagtactacccgatgttcctgaccatgagctccgtcttcccgaacggcgctaccgaagaagacctggccggcatctaccgcccgcgcccgggcctgccgttcacccactacaacctcggcggcaagacccgtttggtatgggtcagcttcaccccgcagcaggtggacatcgacactgattccgccaagggctgggaatacctgatgtccatcttcgatcagatggccgccagccacgtgcgctacatccgtctcgacgccgtgggctacggcgccaaggaagccggcaccagctgcttcatgacccccaagacctttaagctcatctcccgtctgcgcgaggagggcgtcaagcgcggccttgaaatcctcatcgaggtccacagctactacaagaagcaggtggagatcgcctccaaggtggaccgcgtctacgatttcgccctgccgccgctgcttctgcactcgctgttcaccggtcacgtcgaacccgtggcccactggaccgagatccgcccgaacaacgccgtcaccgtgctcgatacgcacgatggcatcggcgtgatcgacatcggctccgaccagctcgaccgctccctcaagggcctcgtgcccgacgaggacgtcgacaacctggtcaacaccatccatgccaacacccacggcgaatcccaggccgccaccggtgccgccgcgtccaacctcgacctttaccaggtcaactccacgtactactcggccctcggctgcaacgaccagcactacttggccgcccgcgccgtgcagttcttcctgccgggcgtgccgcaggtctactacgtgggcgcgctcgccggccgcaacgacatggaactgctgcgccgcaccaacaacggccgcgacatcaaccgccactactactccaccgccgaaatcgatgaaaacctcgaacgcccggtggtcaaggccctgaacgccctggccaagttccgcaacgaactgcctgcattcgatggcgagttcagctacgaggtcgatggcgacacgtccatcaccttccgctggaccgccgccgacggcacgtccacggccgccctcaccttcgagcccggacgcggcctcggcacagacaacaccaccccggttgccagccttgcctggagcgatgccgccggcgaccacgaaacccgcgatctgctcgccaacccgccgattgccgatatcgactaaccgttggcccataaacgccactccgctgtgcgcgctccaagtagtgcgtccggcgtaagctgggtccatggaaaacaaaccgcccgcagtgcactgaagccagtgcgctcgggcggttttgcgtatgcggggttgaaggtcgtgctcctgcgggcgcggcccaagcatcccgccggaatcgacgagacgagcagcagaacagagaaagagcagcatcatgttggaaccgtatgtgcgtccgggtattgatgatcgcccggatttggacaaggtcctaagtcccgaagacaaagccgccgtggccagactggccatcaagaatcgccgccgcccgcccgaagcctctgcggaccagcctgaggcccaggctgtgcgattggcttccgccggttcttcggcagccgctgctgcagccgccagtgtggacactcccgcgccggatatgtcgtccgcctacctcgacatgcgcgatcccatggtcgccgtcaatggccaacgccctaccgcaggtcaggtctcccgactcaactggggtttcttcgctgcttcaattctggtcggcgcaccttgggtggcgttgaacaccattgccatgcccaacgcgattgcgcgtacgttcggctatgacactgctgttgccggtcatatcgccatcaatccggccactggccgcccgttgcccgtcgccaccgaattggcgatgcccctggccgtgttggtgattgtcggcgtagtggcctccatgtttgcgatgccgctgatttcagtgttgtccgaccgcacacgcacgccattgggccgtcgtaccccgtggatggttggcggaggtctgctgtgcgcgctgatcacgctgattctggggcagaatatcggcatcattgtgctttgtattttctgggtgttcctacagttcgcctatgcgatgctttccgtgccgttgaccagcgccatcagcgaacgggtgcccgacaagttccgccctcgcatcgaacgctggcatggcatcggtgtgatgctcggccaagcgcttggcgtgtgcatgggtgcgcttggtgtgatgttcaattcgtttgcgccgtttagttacaccgccgtgctatttgcagtgtccggtattgccaccgtattgattctgcccaaggagccttctagcgctgagcagccgaaccagctttttgaccgcagtcaggtacttgaccaattgcgcccgccggcccacgctcccgagttctcccgggtgttcgccgcccgtacgtgcatgatggccggtgttgggctgaccggtgtgtttctgtggtatctcgtacgtttctgggtttatggcaaggccgtggtacttacgtccgcgccgctgaccattccggccggattcctcattgccggtatggctgtggccacattgatcggtgccgcgctcgcctcctgggccgccgggccgatttccgagcgaatcgaggaaaagaacattcccgtggcccgtgtggtggccggtgcctgcctgctgtatgccgctggtttggcgctcgcatggggccttggcgtctggtccaccggcactgcccgtgaaaacggcatgctgctgtttgcgttgatttccggattcgcctttggcgtctatgattcgctcggacttgaactggtgatggactctttgcccgacccgcgccgagccggccacgacctcggcatttatgcgctcgccaactcggccggtctggcgctcgccgccatcatcggcgcgctactggtgaacgccttcgagcatagcttcggctattacctgctcttcccgtccgccatcgtcatggtgctgctggccggaatcgtcaccctcaccaccaaatctgccgaataataaaccggttcgagtacactggtcagcagtgatccagtccagtactcgcaggggagcaaaaccatggtcggcatgcgcgacgtagccaaagcggcaggggtgtccttaagcaccgtttcgttggtggtcaacaacaccggctacgtctcggccgatatgcgtgccaaagtcgagtccgcgatgcgccagctcaactacattcccaacgagctggcccgcaacctctaccgaaaccgcaccaacaccatcggcgtgatcatgccgaccatcgcccacccgttcttctccacactcaccgcgcatctgcagcgcgagttcgccgcgcgcgacctcaaaaccctgctctgctccaccgccgatacagacaagggcgagagcgagtacatcgacatgctccagcggcacatgatggacggcatcatcatggcggcccacaccgagcatccggccgactactggacctccatccatcggccaattgtcgctttcgaccgcacgctcggtgagggtgtgccggtcgtccggtctgatcatgaacagggaggccgtctgattgcgcgccagctcatcgattccggcgcgcgccacgtggtgctcgttggtggcccgcgttcccagttcgcggaaggcaccactttccccacgattcgctaccatctcaccgtcgagcgtctgctggctgaggccggcattgcctgcgattatgtcgaagccggcaccgtggccgacatcgccgcccacgaagccaccgcatgcgccattttcgaacagtatcctgatgtcgacgccatcgtcggctccgatgtggtggcatccgtggcattgcaggaagcctcacgacggggtatcgaggtgcctgctgatctgcaagtcatcgcctatgacggcactctcatggccgaaaccgccggcaaacgcctgaccgcgattcgacaggacttcccggccatcgccgccgcgctcgccgtccgcatggactcacagatcgccgccgacggtggccccgcctctccgtccaagaacgatagcgcttcggacgttgacacccaacccactcccgaagaagtcatccccgtagccctcatccccggcgaaaccacccggtgactcctatcttggctcccctctctgaggctgagctgtgaagcaaacagtccggtggactgtttgtaggcgaaggcgagccgggaggcgagcaggcagactgcgggcggtagcccgtctgtaattgcggccgagctggcggcgtaggcgactgaggggagccgagtcacggccgcccacagtcacccatctcacatgactcctacgtcacaatgtccacaatgtgaacccttgctggattggcaagacatacaaacctatgtttacattccagttcaggtcgaacggcctgaggaaataccgaaaggaggccacgcgatgactggattcaatgcttctgcgtttgtatccgcacgaattattagcccgtcttcgctggcggactaattcggcactgatgcttgaagccccgtcaacgaaggcagggccaatcaagctgacacaatcggcacggccctgcatgatgcggggctttttttgttgcgctcacaaggcttacggcagaatcccgcagacggaaacggtagtggacagtacacggcaacaacacagcgacagaacaacaacctccctgtggggcgaaataatcgcccgccgatgagagtgaacgagagcaaaacaggagtaacaatgactgcagcagtcgaagagactggcttagggcaggcggcaggtaaagccgctaccttggtacgcgattcggtcaagaccgtgatcgccgcgtcgatggtcggtaccgccatcgaattctatgacttctacgcctacggcaccgccgcggcaaactacttcccgcacatcttcttctccgcgaaggacaaccccaccgtcgcactgctgatgagcttgctgaccttcgccgtcgccttcatcgcccgcccgctgggctcgctgatcttcggccacttcggcgatcgcatgggccgcaagaccacgctggtcgtcagcctgatgaccatgggtgtcggcaccttcctgattggctgcctgcccacctacgatcaggtcggcgttggtgcagtcgccatcctctgcctgctgcgtttcatccagggcatcggcctgggcggcgaatggtccggcgcggcactggtcgccaccgagaacgcgcctgaagacaagcgcgcactgtacggctccttcccggagctcggcgccccgatcggcttcttcctgtccaacggcacctacttcgtgctcgaatccttcaacaatcaggacgcgatgctggcttggggctggcgtgtgccgttcctgctgtccgccatcctggtgatcgtcggtctcgtgatccgcgttcacatggaggagaccccgatcttccgtatggctcaggagcagaagaaggttgtcaagtccccgctgaccgaggtcttccgcaagtcttggcgtcaggtgctgcaggccaccttcctcgtggctgtgacctacacgctgttctacacgctcgccacctggtccctcgcttggggcaccaaggagcagggcgaaggcggcggcaaccttggcttcaccaaccaggaatacctgctcatgctcatgatctccatctgcgtgttcgccctgttcatcgtgctgtcctgcctgtacgcggacaagatcggccgccgtcgcgtgctgaccttctcctcctgcgcgctcgtcgtgttcgccgtgctcttcccgttcctgctggacggtggtctggtcggccagaagaacttcttcgccaacatggtgttcctgtgcgtcggctttgccctgatgggcatcgccttcggcccgatcggcgccttcctgcctgagctgttcgacgccaacgtgcgttactccggctccggcatcggctacaacctggccgccatcgtcggcgcggctttcgtgccgaccatcgccacttggctgagctcccactggggcgtccactccgtgggcctctacctcgccgtgatggccgtgtgctgcctcgtctccgtgctcacttgcaaggagactaaggacgttgactttaccaagtgacgatgttcacaacgtgaaaaacctcaattccactaagtgaacccctgcagggcttttccgatgcgacgggactaaacctgcatatcggaaaagcccacaaggaaagccacaacagaatatcgctcagcgaaaccccgcagaacgcaagaaaatttcaaccccataaataaacaaataaataaaaggagcgccaaaaatggcagcaactatctggtacgagaaggacgccgatctgtccgtgttcgatggcaagaaggtggccatcctgggctacggttctcagggtcacgcccacgcgctgaacctgcgtgactccggtgtcgacgtggtcgtcggcctgcgtccgacctccaagtccgtggagttcgccaaggagcagggccttgaggtcaagccggttggcgaggccgttgccgaggctgacgttgtgatgattcttctgcctgaccagtaccaggcagccgtctacaagaaggacattgagccgaatctgaagccgggcgctgccttggccttcgcccacggtttcaacatccactacggctacatcaagccgtctgaggatcacccggtgttcatggttgccccgaagggcccgggccacatcgttcgtcgtgagtacgccgctggccgtggtgtcccggtcgtcgttgctgttgagcaggacccggacggcaagacctggccgctgtgcctggcttacgccaaggctctgggcgctctgcgtgcaggcgccatcaagaccaccttcaccgaggagaccgagaccgatctgttcggtgagcaggacgtcctcatgggcggcatcaaccacctgtgcgacctcggcttcgacgtgctgaccgaggctggctaccagccggaaatcgcctactttgaggtgttccacgagctgaagatgctcgtcgacctcgctaacgagggtggtctgaacaaggctcgttggtcctgctccgacaccgctcagtacggcgactacacctccacggtcatcaccgaggagaccaagaagcgcatgcagtaccagctcaagcgcattcaggatggctccttcgccaaggagttcatggatgaccaggctgccggcgctccgaagttcaagaagctgcaggaagagtactctcacccgcacctcgagaccgttggcccgaagctgcgcgccatgttctcctggaataacgccgaggccaaggacaaggatgagaccgagtccttcaacggcaagattgctcgtacccaggttcagtgattgtcgcccctgaaggggatttaaactaggaaaccgccgttcccgttcattcgggagcggcggttttgtgttgttgcgcgcagcgaatcattctcaataacaactatgcgctgatttcttgcaggcaaacgaacaccgaatatgcaagatcgttgatatctcagcctttccccatatgtgggattgtgcgattctgttcaaaagggtgcagagttgttatcgagaatcgttctctgcacacggctgtccatactccaatagtgacctagctcacgttgtggactccagcggggctgcgacggcgttctcggtaggattgaactcggtttgaaggacacaatcctcgcaaaacaggacttatctgcacaccgtagatacccccggcgcccagcggcgccacaacccactactgaaaaggagtgccaataatggcagcacagatctggtatgagaacgacggtgatctctctgttctcgaaggcaagaaggtcgcaatcatcggctacggctcccagggccacgcccacgcgctgaaccttcgcgattccggtgtcgacgtggtcgtcggcctgcgtccgacctccaagtcggtcgacttcgccaaggagcagggcctcgaggtcaagtccgtggccgaggcttccgccgaggccgacgtgatcatgattctggcccccgaccagtaccagcgcaccatctgggccaacgacatcgagcccaacatcaagccgggtgccgctgttgcgttcgctcatggcttcaacattcactacggctacatcaagccgtctgaggatcacccggtgttcatggttgccccgaagggcccgggccacatcgttcgtcgtgagtacgccgctggccgtggcgtgccggtcgtcgtggccgtcgagcaggatccgcgtggcgacggctgggctctgaccctggcctacgccaaggccctcggtgccctgcgcgccggtgccatcaagaccaccttcaaggaagagaccgagaccgatctcttcggcgagcagaacgtgctcatgggtggcgtgaacaagctcgtcgagatgggcttcgaagtcctgaccgacgccggctaccagccggaaatcgcctacttcgaggtctgccacgagctcaagatgctcgtcgacctgatgaacgagggcggtctgaacaaggctcgttggtcctgctctgacaccgctcagtacggcgactacgtcaacaccgtcatcaacgaggactgccgcaagcgcatggaataccacctgcagcgcatccaggacggctccttcgccaaggagttcatcgacgatcaggatgccggcgccccgcacttcaaggagctgcaggagaagtactccaacgagcgcatcgagaccgtcggcccgaagctgcgcgccatgttctcctggaacaaggatggcgtcaaggatgccgacgaggccaactccttcaccggcaagatcgcccgcgcccaggttcagtgattttcgctgattagcgcatactaaaaggccgccgctccgattcattcggaacggcggcctttcgcttattccaagggatttacttgattacccacgcagaggtgtcggtgggaagttggccgtcgggagtcagcgggccggaagtgagcaccacagagccttcgggcagtgagaccggggcagtaccaaagttagtaaccgaggtgaacgtgcgtccctcaaccgccgcacggcggtacgccaccacgtccgctcccatatccacctgctcggcggtggtgtcgcgtgtggcggtcagcgactcctgacgaatcgccaacgccgcatgatacaacgcgaacatcgaatccgggtcggcctgctccacgtccaccgcgtaatccttgaaccacagcggctgcggcaggtgcgggtcggcggccggcgtcacgccatcggcgcgaaccgcaggggagaagccgaaggaagcgcccgtgccgaactggccggcggcgcacagcggcacatggttctcgccggtgccatcgtcggccggaatcggacggctgaaatcggccagagcgggctcgtcggaagcggtccaaggcagaggcacgcggcagccgtcacggcccttgtccatcgtgttgcgggcggtgtggaaagcggtaggatcctccagtcgatcccacggaatatcggccacctcaaacagacccagctcctcgccctgatagatataggcggcgccgggcagaccaagctccatcagcgcggcggcacgggcacggcgagtgcccagctcgcggtcttccgggtaggtggtaccgttgcgcagcagccagtcgtgcggcaactggtggtagggcgcgcccttgacctgcggcagaccatagcgggaggggctgcgcggcacgtcatgattgttcatgacccacgtggtggtggagccgccggtttcggccgccgccttaagacccgcggcgatggccttgcggaactcgtcggcataccagttggcctgcgcgaagtcgaagttgaaggactggcccagctcgtccatcgaagcgtacaggtgctggtgctcgggcaccacccacgcctcggccacggcgaagcgcggcgggttgtattcgttgaacaccttgcgccactcgcggtagatgtcgtgcacctcgcgacggtcgaacagcgggtggctgaagtcgtggttcagcacgccgaccacgctgtattcgcggccgagctcctccagcggcttggattcgagatccttggccaggccgtgcgccacgtcgatgcggaagccatcggtgccgtggtcggaccagaagcgcagggtctttttgaactcctcgtggatgtccggattcttccagttgacgtccggctgcgccttatcgaacaggtgcagataccactggccgtcggccacgcgcgcccaggccgggccgccgaagaaggattgccagtcgttgggcggcagttcgccgtgctcgccgcggccgtcgcggaagatgtagcggtcgcgcgccggggagccgggctcggcggcgagggcctcttggaagaacacgtgcttgtcggcggtgtggttgggcacgatgtccacgatcactttgatgccggcctcgtgcgcggcctcggccatcgcgtcgaagtcgtccatggtgcctaggcgcgggtcgacgttgcggtagtcgatcacgtcgtagccgccgtccgccagatccgaggggtagaacggggagagccagatcgcgtcgacgccgaggttcttcaggtaatccatcttctcggtgacgccggcgatgtcgccgagtccgtcgccgttgacgtccttgaagctgcgcgggtagatctggtagacgacggcctgcttccaccagtcgtcattgaggttgttggcggtcatgccgattccttcctgttccgggtgcgttgtggttgggttgttccggttgtgctcgaactgctgtgtgaaggcccaaccgttgtattgatgatgacaacgatatcatgtgaattacgcatgcaaaagtcgatttatcggcgttttgcggtggtaacgtagtcacgcctgcgcggacgctgctgttgcggcaggcggcgcggtggtttcgcgcagtattagcggagtgtccggccgcacgaatgccggttcgattgacttgcccgcaatggcatccaataccatgtgcccggcggccacgcccattgcgaacgggtcctgatgcagtgtggtcagtcccacggcggcggacagggtggaatcgtcgaagccgatgatggagatgtcctgaggtacccgccgcccgtattgacgcaggcgatacagcacgggtgcggccatttcatcatcctcaaaacagaaggcggtgatgctgggggaggcgttcagtacggcgttcaatgccgcgttgctttcgccaagaccgcgttgaatgctcaggggcgttagctcgatccccggatgggcggcagcggcatcaatgacgccctgcaggcgagcctcggcactgtagcgcatattggtttcggtcggtgcgctgccgacgaatgcgatatgccggtggccgagtgcaatcaggtgctcgatggccgaacgtgtggcggcgtaatcgtcaatgctcacgcctgcgtcgaacccatcggtggagggaatgttgatgccgacaattggcacgtgcatatgcttcagtcgctccacttcagccggctcaatgtcgaaggagctgacaatcaccgcatccgcattgcgtcgcacgggcaaatccgcaaagaagtcatggcgctcggcggcgttgcgcatggggtagggcacagtgtcgtagccggaggggcgcagcgccgagtcaaggccggcgaagatgtttgcattgaaccaggtggtgatggtctcgctggccagcagcgcaatgcggaacgactggccggacttcagtgcggcggccgagcgagagacggagtagtcgagcttttcggccgcggtcatcactcggtctcgagtctctggaagcactagatccggcttggcgaaggttcgggacaccgtggatacggaaacgccggcctcgcgggccaccgcttgaatgcttgccttggtcatatgccgtcgctccttcgccgtcgcgaacaatcattgtcatgacaacgataacatgcccataacaagtcgtcgtcttcggctatctcgattgcgagggggctgatttagaccaatttcccattgccggaatcgatcaccgcttctctcggcgcatcacggcggctagggactgcacgcgtggcaggtcgaagacctcgtcggtatgtaccacgtggcctgagctgtccgccagcggcacgcgccagttcgaatactctctggaagtgcccggctgattctgggagcggcattcgcccacgccgtccaccagcgctgcctgcagcagcagcgacggcgtatcggtgagcatggcgtgcatcgcttccacgatttcctgcacatggccttccacatcatccgccacggtctgcgagatatagccgttctccaccagacggttcatcatggccgtgcgctcggccatcgccgaggcggcgaatgcctccaccggctcgctcaggagatgcagctcctcgcgcagcttgacgtgtgcgaagttcaggtagccggcggtgggtggcagatcgtgcgtggtcaccgaggccaatgcctgtttgcgatagtccttgggtgcgcggtacgggtcgccggcgttcggcgaatcgtccacgcggttgaaccattccacgtcagtgccgagcacgccgtgatcggccagaatgcggcgcacgtaatccggtacggtgcccagatcctcgccaaccaccatgcctccggcgcgcgtggcctcgatggccagtactcccaacatcgcctcgtggttgtacgtcacgtatgcgccgttgcgggcaccgagcccctgcggaatccaccacaggcggaacaagcccagcacatggtcgatgcgcaccgcgcccgcgtgctcgtacatcgaatgcaccatctcgcggtacacctggtagccggtggcctccaggtagcgcgggttgaacggtggctggccccaatcctggccctgctggttatagaagtccggcgggcagccgaccgtgacgccacctgaggcgaagcgttccggattggcccaggcatccgcgccgagcccgtgcacgcccacggccatgtcctgcatcagccccagcgtcatgccgtggtccagcgcctcctgctgcgcggcgttcacctgctcggcagcgatccactgcagccagcggttgaactcgaacaggtcgtggtgctcctcgacgagctggcgcacggccgggtcgtcgatggtcttctcgaagaaccaacggttctcgccccacggcgcgccccatacctcgaagcacaggcaccatgtggcgaaggaatcgaggtccgggccggcggtggtcttgaaatgctcgaattcgagctcgcgcttgttgttgcggcccgcttcgaagatcaggcgcagcgccgggcgcttggcctcccacgccgcgttgatgtccatcggggtcgattcgtcgttgcgcgcggccaccgaatcatgcagcgcatccacctgcgcgcgcacgtcggccggcagtgtggcatattcggggatatcctgcggccggatgtacgtcacgttgaggaatcggcgcgattccggtagatacggcgatggctcaagcggcggaatcggcgcaccggcgtgaatcggattgatgagcatgaagtcggccttggacttctcggcggcatctgccaaaagacgcttcagatcgccgtaatcgccgatgccccacgattcgcgggaccgcacggaatacatctgcgtcatccagccccaccgctggtgctcggcgaccgcctccggcacgggaatgcgcgcgggggcggcgatgatggccgccttgccctcgcgcccgtcaaccgtgacggtcagcgtgtggtaacccatcggcaggtcgggtgcgatggtcaagtccggcttgccggaattgaggttcggcagcagggcaaagtggccaaacgcggtgccgtcctccagttcgatggaggcggtgatgtccgcgtccgacgagcagttcagggtgatgccggtcggtttgccggtggtggcgacgatggtggaggggagcaaacgtttgctgttttccacctcaagttgggtcatggagcgtacgatggcctcgtcgctggatgcgtccacgtcgagggccttgagtacggcgaccaaggccgcgtcgctgatttcggtgtaggtgccgagctggtcgatgaatgaggtggcaagtccgcaggctttggcgagcttgatgagcgggcgggcgagtcgttccgtgctttccgcgcgctgcggggcaccggaagcggcgttgttggtggtgtctgcgatggtgccggtgctggttgctgcgtcgttgccgtatgcgtcggtcatgatgactccttgcttgcaaatcgggtactgctagtcgtttgcattgctgttcgagggccgctctgcgttgaggttccggcaacctgacagaccaatgttcgagctgttctgcctctaccgtaactcatattgacaacgattgcaatacattcggtgagttggacgaggctagaggtgttggtgtttgtcgtgatggcccgttgactatccccagtcgactttgccgacagcctcgccggcggaggtgaggtcgaacgggtttaaccaaacacgacgaacgattgcggggagagcgtcagctgcccgccgctcacggccggttcaccaagactgagcagcacgtcggcgtcggaagagagctcgtccggcaggtattccgtgaggaatgaggcgattgaggcacctgaatcggcgttgaaataactggaatcgccttcgtgctccataggcgtgtcggtattgcgcagcaacaggttgtagccgttcgggtggccgtcccggcgccagtcgaggtagaggtccatgtcgaagccggcctgcatcgattcgttcggatggcctggacgccatcggcggaccgacctgggtggattccgataaggcggccgtatgggtgaccaactgggacaccgagcgcaacggctcctcgctcaccacccgtgacggcaccagctacctgctcgccaacgccttcatgctcgcctacgattacggccagccgcacatcttctccggctactactacgccggcgtcgacgacggcgctcccggcgccacccgcacctccgtgccggacatgacctgtccgaccgacggcatcgaaaccgccggcacctggcactgcgcgcaacgctggaccgccatccgcggcatgatcggcttccgcaacgccgtggccggcaccttcaccgccaccgtggccaagggctcggccgtcgccctatacgccggcgcgacgcccgcaaactggaccggcacccggaaatacgatccgtccgatcccgcctggttcaccggcgaaacaccgcataagggcgatgacaccgccgccaagtccgccgattccgcagcgtccgccaagtcaggcgacgccaagtccggaaaggcaacgtccgatgccatccgccgcgccgcaacgctcgccgccatcctcctgcccgtcatcgtcggcgtcacgttcatggcgatagctcgcaggaacggcaaagcccagtccgacaacagcggcccgaatgacgactgattcggccccgctcagccgcgcacccgcggcgcggcggtggagtcgcgtaccagcagttgcacggggaagatctcgtgcggctggtccagggtgcgcccctcgataaggtccagggccttgcgcgcggcggcgacggccatgtcgtacggcttctggcgcacggtggtcagccccacctcgcccgagaacgtgctgttgtcgaatccggtgacggacaggtcggccggaatcgccatgccgcattggcgcaggcggaagaacagcggaatcgccagcgaatcctgatggaagcacagggcagttggggcgtcgtcgcgcgcgagcagcgcggtgagggcggcgtcgaccggatcgtcgccggcctgcatgtccatcgtctggccggtcacgccgtccagttcgctgcacgcctccaggaatccggtgacgcggttgtgcgagctgaagcccatcgtggcatcgaacgtctcgtacaaatacaacaggttgcggtggccgagcgtggtcagatggcgcacgatcagccggatgccggccttgtcgtcgatgcccacggaggcggtgaacccctgcgaggccgtgttgatgccgatgagcgggatccgcgtggtgttgagtcgcctgatttcggccggggtgatggcgaacgacgagacgatgaccgcgtccgcgttgccgcgcaccggcagttcgtcgaagaactcctcgcgcgcgcccgcgtcgccgatcggttggatgaccagatcgtagccggccgatcgcagcacttcgttgaggccttcgatgatgcgcgaggtgaaccagtcgagcttgctgctgcccaccagcagcgccacgcggtgggagcggcccgatttgaggatgccggccatgcgggataccgagaagtcgagttgttgggcggcctccatcaccttggcgcgcgttttggcggagaccatgtcagggcgggagaacgcgcgggagaccgtggcggtggagacgcctgcttgcctggcgacgtcctcgatgctggctttcatggcccctcccggtttttcaaagttgacggtgtgacaaacttctcttcattgtaaatcattgcagtacgttttacgacagtcatagtgcaatgggttgcgatattgcgacacgccgaaaatatagaccaatatggtctcaatagctttggaatgtaacaggttgcaaatgtaacggtttgcatggctgagaaagccgggttgccgaactagttcgacacccgtatactgaaccgtgttcacttagagcttgcgaggaagtaagggagataatgaagatcaagaaatctctcgccgcgctgactgcaaccgtgagcattatggcacttgcaaccggttgcagttcgagcggttcgtcaggcgtcgtcgacacccaggccgacaagggcctggccgtcatgggcgacaccatcacctacgaccccaaccacttggtcaacgacggccagcccatcgaactgggctactggtcctggggcgacgaaagcactgacccggtgatctccatgctccacgagtacgagaagatccacccgaacgtcaccttcaagatctcgcaggtggcttggagcgactactgggtcaagaccccgctctcgctcaagggcaacaagaacgcccccgtgctgttcaacgtccacaactccgaggatgccctgctccgcccgcacgccgtccgcctcgacggcgccagcgactggcgcatcttccaccaggtggtgctgccgatgagccgcaattccatcgccgcgctcgccatcttcaccttcctgtggaactgggaggactacctctggccgttcctcatgatcaccgatgacgacaagcagctgttgtcggtgggcctcaagatgttctccggccagtacggcaccgattacggcggactgttcgccgccacctccgtgaccatcatcccggtggtcatcgtctacctggtgttccagaagcagttcatcgccggcatcgccaccggctctggcaagtaaacccggccggtttcggccgaatccgaaccgcgccgcagtctcccaccagtcccggggagccgcggccgcatcactcgtatcatcgtgaataaccgtacagaaggggtaaccatggcacagtcaccacaactcaagcagtcgtctccgacctcgcccgatccgcaggacttccgcctcgacgccacgccggccatgcgcgccgacaatgtggtgtccggcgagcactggcgcatcggactcatcaccgattcgctcgtgcgattcgaatggtccgattccggcgtattcgagaaccgcccgacccagaccgtcctgaaccgcgatttcggtagcccagtcgaacgccgcgtcaccgagcgtgacggccgcgtcatcatcgacaccgcggccctgaccatcgtctacgaccagcagccgttcagcaaggaaggcctgagcgtggtcgtcaaaggcgtggccgacacccagttcaacacctggcattacggtgacgcccagcgcggcaacctcaaaggcaccgcccgcacgctggacgaggcggacggcgccatcgagcttgacaacggcgtgatctcgcgcgatggctgggccgtcatcgacgattccgccgccaacatcatcatcgaaaccgacacggtgaacggcaaggcgaacccgttcggcacctgggtatccccgcgcgccaccgccgaaacggacttgtacttcttcggctatggccaccgctacatcgaggccgtacgcgacttctatcgcctgaccggccccacgccgctcctgccgcgcttcgccatgggcaactggtggagccgctactaccggtacacgcaggacggctatctggccctgatggaccgcttcaagcgcgagggcatcccgttcaccacctccgtgatcgacatggactggcatcgcgtggacgacgtggacccgaagtacggttccggctggaccggctactcgtggaatcgcgaactgttccccgacccgccggccttcctcgccgacctgcaccggcgcggcctgcgcaccacactgaacgtccacccgcgcgacggcgtgcgcgcgttcgaggacgcctaccccgaagtcgccaagcgcgtcggcatcgacccggccaccgaggagaacgtggaattcgacctcaccaacccggacttcgtggacgcctatttcgacatgcaccaccgcatggaggccgaaggtgtcgacttctggtggctggactggcagcagggcggcgtgacccgccagaagggtctcgacccgctgtggatgctcaaccacatgcactacctcgactcagggcgcggtggcaactggccgctcaccttctcccggtacgccggccccggctcccaccgctacccggtcggcttctccggagacacgatcgtgacctgggaatcgctcgccttccagccgcagttcaccgccaccgcttccaacatcgggtatggctggtggagccacgacatcggcggccacatgttcggctaccgcaacgaagagctggaggcccgctggtaccagctcggcgcgttcagcccgatcaaccgactgcattcgtccaactcgccgttctccggcaaggagccgtggaacttcaaccgtgacgtgagcgccgcgatggtggacgcgctgcgtctgcgccacgcgatgatgccgtacttgtacaccatgaactaccgtgccgccgaagccggccgtccgctggtcgagccgatgtactggcagaacccggatacgccggacgcctacgaggtgccggatgagttccgcttcggcaccgagctcgtggtcgcgccgatcgtctccccggacgatgccgccgcctgccgcggccgcgccgacgcctggctgccgcagggggagtggttcgacttcttcgacggccgccgatacgtctcatccgacgccgctggccgccgactggaggtctggcgctcgctcgaccgcacgccggtgttcgccaaggccggcgcgatcgtgccgttgcaggacgtcgcggaatccggcgaagcgatcaactctatcgccaacccgcaggccctgcgcgtgctggtgttccctggtgccgacggctcgttcgtcatgcgcgaggatcgcggcacgtggggcgccaccagcgccgacaccgcgatagcgttcacgtggggcggggccgatgcgtcgcccagcgccttcaccgtcgcgccggttaccggcgatacgtccgccgtacccgagtcgcgcgactggacggtcgtgttccgcggcatcgcgccggtcgatgcggccagcggcgtgcgtgcatggtccggcgaggctccggtcgaggcaacggtggcgtacgacgaggcgaccatgagcctgaccgtgtccgtcaccggcatcagctcggctgccagtctgcgcatcgagattcccggcggtctgcgcatcgccgacaatccggtcgaatcggacgcgatggacctactgctgcacgcccagatgctctaccgcaccaaggagctcgcgctgcaggcggtccacaagctcggcatcggcgcgatcggcgccctgcgcaccatgaaccgtggtccgcgctacgccaacgatttctggatcaccgacatgcccgatgcggtggccggcgcgctcgaagaaattttgctgcgcagctgagcccggttgcagttttctgcaacatccgggtgcgccccggtatgcggcgataagttcggcatggttgccgaagagcgtggcataccgggtgcagtgcgtgggatggccttcgcgattgcactcatcgtgcggtcagtggaaaggaacttttcatgcacaaggtgaaacagcacaagggcgtcgcggtggccgccgcagtctgcgcggtcgcgatggcggcctcgctcgcgacccacgccggcgcggccggggaccggcgttattgactggctggcgttatcgagtgattggcggtatcaattagccggcgttattgatgagccggcgttgtcgattagccagcattatcgaccggcactgaagcatgcagtacccactgcccgcgtttctcccgcacatcccaatccccatgcgcatgcagcacacgctcccgatagtacgcaagcccggaatgccgccccctcaaacgtcgcgtcaccttgacacggacggtccgtcacatcaatggtgacgcggtcctgagcggcggaaaccagcaccacgtaacgctgcgtcggatcgtcatacctggcgatattgccgaacaattcccgcagaaaatcggcgacaaacactgtgtctgagttattcagcgcatcgatgcccccagcgacaataacgtcgccgacacaccccatgcgctgcaatcgcgcgccgccgctggcaagtctgatgacaaggccgatgtcgcgccccagtcaccccttgcagttttctgtataagtggattttggctccaaacgcaccactccgtcatcgccgtcagtcactcccgcaaaaaacttgagccaaacatactcaactttttgtgttgaaattgggaatagaacttgccaaatggaagttgagtgatgtaggctcaagtttggaaggtccaagagacgacccatcggaacttgggcaaagaacgtaagaacaaacgagtaattaaggagcacacattatggcacgtgcagttggtatcgatctgggaaccacgaattcctgcatcgcaactcttgaaggtggcgagcccaccgttatcgtcaacgctgaaggcgcgcgcaccacgccgtctgtggtggccttctccaagtccggcgagatcctcgtcggcgaagtggccaagcgtcaggccgtgaccaacgttgaccgcactatttcttccgtcaagcgccacatgggctccgactggaccgtcgacatcgacggcaagaagtggaccccgcaggagatttccgcgcagatcctgatgaagctgaagagggatgctgaggcctacctcggcgagcccgtcaccgacgccgtcatcacctgcccggcatacttcaacgatgcccagcgtcaggccaccaaggacgccggcaagatcgccggcctgaacgtcctgcgtatcatcaacgagccgaccgcagccgctctggcctacggccttgagaagggcaaggaagacgagcgcatcctggtcttcgacctcggcggcggcaccttcgatgtctccctgctggagattggcaaggatgacgacggcttctccaccattcaggttcaggccaccaacggcgacaaccacctcggtggtgacgactgggatcagaagatcatcgattggctggtttccgaagtcaagaacaagtacggcgtcgacctgtccaaggacaagatcgcgctgcagcgtctgaaggaagccgctgagcaggcgaagaaggagctctcctcctccacctccaccagcatctccatgcagtacctggccatgacccctgacggcaccccggtgcacctggatgagactctgacccgtgcgcacttcgaggaaatgacctccgacctgctgggtcgctgccgcacgccgttcaacaacgtgctgcacgacgccggcatctccgtgagcgacatcgaccacgtggtgctcgtcggtggttccactcgtatgcccgccgtcaaggaactcgtcaaggagctcaccggtggtaaggaagcgaaccagtccgtgaacccggatgaggttgtggctgtcggtgccgccgtgcagtccggcgtcatcaagggcgaccgtaaggacgtcctgcttatcgacgtgaccccgctgtccctcggtatcgagaccaagggtggcatcatgaccaagctcatcgatcgcaacaccgccatcccgaccaagcgctccgaggtcttctccaccgctgaagacaaccagccgtccgtgctgattcaggtctaccagggtgagcgtgagttcgctcgcgacaacaagccgctgggcaccttcgagctgaccggcatcgctccggctccgcgtggcgtcccgcagatcgaggtcaccttcgacatcgacgccaacggcatcgtgcacgtgtccgctaaggacaagggcaccggcaaggagcagtccatgaccatcaccggtggttccggcctgccgaaggacgagatcgaccgcatggtcaaggaagccgaggctcatgaggctgaggacaagaagcgcaaggaagacgccgagacccgcaaccaggccgaggccttcgcctactccaccgagaagctcgtcaacgacaacaaggacaagctctccgacgacatcgtcaaggaagtcaccgacaaggtcaacgctctgaaggaagccctgaagggtgacgacaccgagaaggtcaagaccgctcagaccgagctgatgaccgccgcccagaagatcggccaagtcctctacgcccagcagggtgccgagggtgctgccgccggtgcggctggcgctgacggtgccggcgcttccgctggttccgacgacgacaccgtcgaggccgaggtcgtggacgacgtgacgacaaggacaacaagtgatgtccgagttcaacaaggacgactacctgaacgacctgccggatccctcagatgctgaggctgccgctcaggcctcttcaggggctgacgcctccgccgagtccggctctgcgcaggattcggctgcccaggctccttccaatgaaggagccgacgcggctcctgccgcagctgagggagagaagactggcgaaggccagtccgattccgcagacaccctcaccccgctcggcaaggccaagaaggaagccgcagactacctcgaagctctgcaacgcgaacgtgcggagttcatcaactaccgcaatcgcacgcagaaggagcaggagcgcttccgccagcacggcatcatcgacgtgctgaccgcgctgctgcccgccctcgacgatatcgaccgcattcgcgaacacagcgagatggacgactcgttcaaggccgtcgccaccaagattgacaaggccttcgagaagttcggtgtcgagaagttcggcgaaaagggcgaggacttcgaccccaccaagcatgacgcgatcctgcacaagccggacgcggatgccgaaaaggaaacggttgacaccgtggtcgaggccggctaccgcatcggcgatcgcgtaatccgcgccgcccgagtagtagtagcctccccgcaaaactgacatccagctcgctgcaatgagttgatatttaccttggctcccctctctgaggggagccaatcataaagacttttctagaaaggagacatgaatggctgaaaacgaatggctcagcaaagacttctacaaagtccttggtgtctccaaggacgcttcggacgacgacatcaagaaggcgtaccgcaagctcgcccgcaaataccatcctgacgtcaacaagaccaaggaagccgaggagaagttcaaggacatctccgaagcctatgacgtgctgagcaagaaggaagatcgccagaagtacgacgcgattcgtcagttcggcatgggcggtgcccgcttcgccggcggttccggcggcttcgatgcttccggtttctccgacatctttggttccatgttcggccagggtgccggcggcaatggctcgcgcatccgcttctccacttcgggcggcggccccaacaacatcaacgacatcttctcgatgttcggtggtgctgcaggccaaggcggccagccgtatggcggctacggccaatcgccgtacggcaatgccggcggctatggctatgaggaggccccgcgccccgaaaacggcgaggaccgcaactccaagatcagcctgaccctgcgccaggcggtcaagggcgctaccgtgtccctgtccgtggacggcaagaagttcaaggcccacgtgcctgcgggcgtcaaggacggacagaaaatcaagctggccggcaagggcaagccaggcatcaacggcggcaaggccggtgacctgtacctgcacgtcaccgtcaagcccgatgccacattctcgatgcgcggccatgatatcgtcatggacctgcccgtcaccgtgggccaggccgtggccggtggcaaggtcgaggccaaggatatcgacggcaatcccgtcaccttcaaggtgccggcaggctccagctccggcgcggaagtcaagctcgcgggacttggcgtccagcgcagcaaccagccgggcgatctgatcggccgtgtgcagatcatggtccccgccaagccgggtctggccgtcaagcacgccgccaaagaattcgacgaaaaagccggcgactatctcagcctgtaatcaggaggtgaacaatggcgcggttagccaaccagatgaagcagttgtacgcgatgtgcgcaaccgcgctcgtgatgggcagggccgatctcgacggagccgatgacgtcggcttcgacatcgaactgcccatcttcaccgtcggccagaccgccgagttggccaacattcacccccagaccctccgtcagtacgaccgcctcggtttggttcgtccgcagcgcaccgatggcggcgcacgccgctactgcctgcgcgacattgcccgcctgacccgagctcagcgcctgagccaggatgagggcatcaatctttccggtatcgcgcgcattttggtcctcgaagaagagaatcgccaactgcgccgcgaagtcaaacgcatgcaaaccggcgaccaggagagcgttttcgccgcaggccgtgacggcaatatcgtggaggtacaacgctccaaccgcgcccgcctctggcgcaacgccatccgccgcgaaacccgcgaactgcccggccgcgatactgccgccgatatcgctgccggcgccaccggcgactccaactacactcccgccgactccaagtccatggtcctgtggggttggtgagtctggccgcattgcttcgattccttctccattcgtaaaactgtttgttatctcacatcgggcagctgccgaaaaaaaagcacgaatcttcttgacggagatgtcaaggtttgttacggtgacgtgcgaaaaccgattcgtaaggggtgctttaggctgagacggtatgtgccgaacccttcgaacctgtgagctaacactcgcgtagggaatgcgacggttgaactcctctgttcggctcggcatcccatatgcgcgttgagagagaggaagcgtatgtcaatacgcaaggagctgaccgcccagaacgtactgctgggtttccagcatgtgcttgtttccaacgtctggcttgatccggtgtttgtggccggagcaatcggcttacctattgccctgtcgtcgaacatgattaacgccatcttcatcgtctctggtctggtcactttggttcaggccactcggctggttcgcctgccggtggtgcaggggccgtcagctgcgtttgacgcgttgatgatcgcggcaggtacggccggcatgctgggggcggcgagttcgtccattctcatcgcttcgcttgtgttcctgttgctgtgcctgaccggtgtgatagagcggatgcggttcctgttctctccgatgatttcgggcgtggtcatctttatggtcggtgtctcgctgtctggattcacgctgagcgagtttctaggcggggctcccggcgacaagacgttcgccgatccgcacatcctgaccgtgtcgattctgaccacggcgattgtgcttgtcctgtcgttgctcggcaagggcctgctcaagtcgttctcattcctcatcgcgctcgtcgtcggcaccgtggtcgccgcagcgtttggcatggtggacttctctcctgtggcatccaagggatggttgggcctgccgaccttcctgccctacggtccgttcacatttgactggaagatcttcatcccgttcttcatcgcctacatggttgccgtcatggaagctctcggcgtctatcaggcggcttctgagattcagggcacgcccctcgaacgcaagcaggtgcgctacggtcttgccggcgaggcggccggttcagccatttcctcgctgattggtggattcaccaccaccgcctacccgcaaaatgtcggcctgctcaacctgaccggcgaaggcaagttgcgcacgcgcacgcctgtgatcatcgccgctgtgctgttgctgattctgggcttcgtgccaaaggcgggcgcgttgctgtccgtcattccctcggcagtcgtcggaggcattttcctgccggctgcggccagcctaatcgtgaccggcctgcgcgccctgcgcaaggtcgctgatgacgagcgccgtcaaacggtcatcggcatgtctctgttgctcggcatcgccctgcccaaggcgctctccggcctgaccggcggcgcaagcgtgttctttggcaacaacatcatggtcggtgtattcagcgccatcattctcaatgcgcttttcgtcgctcttccggatttggtggcgaagcatcgtgcgccggcgtccgtggatgttccagcagccgatccggcggatgggactggcgctgcggcgtacgatgaacgataatgctggttgatattggatattgacaggagcgatgcaatgactgatgtgatggatgacgcgcgtcgtatcaagcgcgggattctggattttatccatacctatggctgtgagcaggccccggaagaggcgtttggtgcgttggcgcgcgacgtgttcatctatcagtacacgtatgatctgccgtaccgtcgttactgcgcggctaaacgcgtcacccccgcaacgctcaaggattggcgggagattccgccgatgccggtggacgggttcaagcaccttgacctttcgaccataccgaccgagcagtgcaaagccgtattcatgacgagcggaaccacgcatggcggcaagatgcgtgggcgcaacttccaccccgatcttgaggtgtgggatgaatcaatgattgtgccgttccgtcatttcatcatgccggatcgagagcgtatccgcatcgccgtgatttcgccggcatgggacatgaaccagaactcctccctgtcgcgctaccttaccaaggccgtggagtgctgcggcagcgaaggcagcggtgtgttcttcgacgagcatggactcaagttcgatgaaatcatcgccttccttaaccgtgcggtgtctgacggtgaaccggtgatgctgatgggtgtctcgtcgtcctatctgtatctgctcgattacctgcatgagcatgatctgacgttcgtgctggcccccgatagccggttgttcgacactggcggcttcaagagcactaagcgcgacatcaccgaagaccagatgcttgatgagctggaacagacactgggggtgccgcgccaccactgtgtcaacatgtatggcatgaccgagttgagctcgcagatctatgaccaaaatattctgtcgtggtatacggatggcaccagcaactatctcaaggcgaaccccgcctgggtgcgcacggtcttcctcgatccggaaacgctgactcccgtcaaggatggtgagaccggtgtgatatcccattacgaccttgccaattggaattcatgcatcggtattctgaccgaggatctcggccatcggaccccggacggattcctgctgcagggcagggcgaagggagcagaggctcgtgggtgctcaatcgcggtagacgaggtcatcagtgccaaccgttgatgaatccgtgagtcaggccattgatgtcttccacctgccctcgggagtggatgtttcggattacgaaatctatgaggtcgccacatcggatggggtgaagcgcttgcgctatccgcgactggatggcccaaaggtgacttcccttgccaagcagcttgccgatgttcgcaaccgcacgcttgccgcgatgagtgtcaacgatattctcgacatcgtggccgacgcggcccaactatgggccgatccggattttgagctgcggcgtcaggctgaactgctgattcccgcaatcaccggatatgagcctgacatggtgcggattgagctcaaacggtatatgcgccagttcaggcgtcgtgaactgctccggttccttgactccgaaatcggtcagccgtctatgctcgacgaattccggccgaacaaggcggggggatactctaaatatgtgggcccagcgctcacctatcaggtgttctccagcaatgtgccggggattcccgtgtggagcatggcgatgaccctgctggtcaaaggcgcgattcttggcaaatcttcattttccgagccggtgatgcctgcgttctttgctcgcagcattgcgatggtcaattccgacctcgctgatgccattgcggtggttccatggaagggcggctcgcagcagctcgaggattcagccatcgatgcggccgatgccgtgattgtttacggttcttcgcagactaccaaattgattgcgggcaaagtcgccgggtccaagccctgtctaggttacggagcaaaagtcgggttggcgttcattggccgagaggctttgcgtcctgatacctatgccgatatcgtgcatcgtgtggctgttgacatcgccacatatgaccagcaaagctgcctggctccgcagaccgtgttcgtggagactgatggagccctcacccctcgtgaagtggctcagctgctcggtggcgagcttgagaatcagcagcgcaaatatccgcgctccgtattgagtgacgccgagaacgtggccattcagcgggcgcgcaccgacgctgagatgagagccttgatgggcgggaaggccgcggtgttcgccagtggccatagcacggcatggtcggtgctgtatcgagaacttgacggtagcggtgccgacgaggatgttgcttcgctgatgtcgccgttgaaccgcaccgtcaacgtggtggcggtgccagatttgttggacgctgccagaagactgacttcctgccgtggctggctgcagagctgcggtgtcgctgtggattcaaccagactgtttggtcttgcagatacattggccgaggtcggtgtgaatcgcatctgtccgctcggtgagatggatcgggcgaaatccggctggcatcatgatgggggcttcaacctcatcgatctgttgcgcgcggtggatgtcgaacgcggcagcgacgcgtacagcgattcgttcgatatggatatggaataggcctgtgctgttgcgggcagcagagactggtagcagggcgaaaggcaagggtaatgacagagcaaagcgatatggcacggcgtccaatggtgaatctggatggcagaacagcgatcatcaccggttccggcaagggcataggagcggctgtggcgaaatgcctggcatcgcacggagccgctgtcgtcatcaattacgtacatgacgccgccagcgcgcagcgcactgttgaagacatccactcgctgggaggcttggctatagctgtacaggcggatgtttgcgatgaatcgcaatcttccaagctggtgggtaccgctgtcgactcattcggcggcgtggacatcttagtgaataatgctttcggacgcttctcctttgacccgcgtcgccgttccacttttgctggaggcgattgggatgagtttagcgcacagatcgagggatgcctgcatggtgcatatctgatgtgctcacatgtggtgccgctgatgcgagcccagacctccgggcgtatcatcaacatctccagcaatctggtcgattcgcccatcgtgccctaccattcgtatatcactgccaaaggcggcttggtcggcatgacccgctctctggcccaggagctgggcggcttcggcattaccgttaatgccattgccgcaggtttgacggccggaaccgcatccagcgcagccaccaccgaggatgttcgtgaacgaatcattgccatgacgcctcttggccgccttgcccgtcccgatgacatcgccggaggggtcgcgttgttggcgtccgacatggccggcttcattaccggacaatgtctgcacgtcgatggtgggctgaccatgcgctgaggcgcaggggcggtgtgctgacgcgctatggttgtcgcatccgattggtgcaatggaatgcagcaagagtaaaggcgccaattggcgtgcgggcatgtggacggaggtaactatgctgctcaaagccgtgttctgggatttggacggtactctcatcgattctgagccgctctggcatgacggtgagattgagatcgcgcacaacaatggcggcgagtggaacgaggacctcggttgggagtgctccggcactccggtaccacacgtggcagaggtcatgattgcgcatggctgcacattgagcgttcccgaaatcgacaagcagctcaaggattatgtgttcaaggcggaggtcgaacgtctgccgtggattcctggtgtgcaagacgtgctgcattcgctcaaggaagccgacatcccatccatgctggtcactacttcgcctcgccgcatggccgagaacatcatgaagcaggctgatggattgcttgccggctacgtctgcggcgatgatccgtacgagcacaagccgagccctgccccatatctggccgcggctgagagactcggcatcgcgcctgaagacatggtcaagtgcgtggtaatggaagattcctcatccggtctgcgctccggcgccgcctcgggggccacactgattgcgcagactggctggattcgcaccgacacttccggccttggccagtttgcctccatcgactcgtatgagggcatcgatgcggccgcgctggacgcctttgtgcggcagcgtttgggggagtagaaatttcgtttgtattgcggagtttgtgtgggaaaccccagtcgacctgatgttataggccggctggtagggtatttgacggtttgcatataactgtctggttcattgggctggcagctcaatacaagatttaggactcataggaaacacatgggcttcgttaatttcatcatcgaactgctgaaggatccgcgtgccgcgattgccggttggattgccatgggcgtggcgccgaccctcggattcatcttcctcatcgtattcatcgaaacgggcgtggtgttcttcccgttcctgcccggtgattcgctgttgttcgcggccggcgtgttcgcagccccggatgctgcgaccggcaaggccgcgctgccgctgttctggttgctgccggtggtttggtgcgcgccgattatcggcgaccagtgcaactacttcatcggtcatttctttggccgccgtattatccaatccggcaaggtgaaggcgctgactcctgagcgactggccaaaaccgagggcatgattgaaaagtggggcccgctggctgtgttcctgggccgcttcttcccgttcattcgtacgttcatgccgttcatttccggtatttccggtatgcgttggagccgtttcacgccgttctcagtgctcggcggcctgtgctggtccacgttgttcacgctgctgggctacttcttcggcaacattccggccgtgcaggatcacttcgaactggtgatcgtgctgattctgctggtttcgctcgccccgaccatcatcggtctgctcaaggccaagttcggcaagaagaagccggccaaggtgaccgatgctcagttggacgtcatggaagacggcatcaagaacctcgataagtaagcaaggaatgtagattaccgcataaggaatcgtcgtgaaaatgaaggccctgactgtgcatatgaggtcagggccttttctgcatgagatgggcgtgaaacaacagcgtggttatccacatttgtcgtggacgacatgccggggtgtggataactcagcaagctagaaccacaatggtcgattcgtgttgagcattgaactcggacacgtttcaatcggcttatgaatagcaacaccacaccccgcgtggcgcgtaggatcacctcgccagcggtagcacctccgggcattccgctgcccacggacgatgcgccgattccagcgcatcgctactacactccgccgcccaggccgttggcctcatgcgaacggcagagatcgggcgaggctccggcactcgccctaactacagacaccagcttccataacattgtgacgatgacgtcaggtcatggaggcgtggggctgagtgtcatggcttccatgcttgcatggacattggcgagacgtgaacacagctgcgctctcatagacgctgatttcgtggccggatgccttgacctgctgctgggtgtagaacgagagccgggtttacgattcagccaagtcgacgcacccctcggccgcatcgagggcgatgcgatgaaccatgagctgatgatgtgggagggtgtgcgagtacttccctatgacccttggagcgcgcgccagcctgactggtgggaagttcaagcggccattcgagccttggcggaaacgaacgacgttgtcatcgtagatgccggtcagggtggactcattgagaccgtacccgatctgcgcagtggcatgcaggtgattgccgcggaattgtcggtgatggggctggccagagccaagtcgcaccggtccagactggattcatggggctgtgaagcgccacatatcgtcggcgtggaaccacgtggcgctccacgtgggagaggccacgtgggtattggtgaggcgcaggactatttgactgccacggtattggggcctgtcaaaccaagtgtcaatctgtgtggagacgtactggaaggcctcggcatcagatcggtgaccaaaggcagccgcaaagccgtgagcttgcttgccgatcttgtcgagcaggccattcgcccggtttcgggagcttcttgcaaggaccggtgatgcggtatggctgccgtaatcactcgggctgatgagcccggcgcagtgcccagaactgtgttcttcggtctattgaatgatgtggcatccgacccgcaggttaccgatctggcggtgacctgtgatggccgcgtttgggcggaccgcggcaacggcatgcgagaaacagtattgcgtgtgccgtttcgctcgccgcaagtagttcgagaatacgccgtccaactgtgcgcgcagcttgggcgcagactggatgatgcctgcccgatagcggacgccgccagtccagacggcatccgcgtgcatgcggtgattgccccattggtgccacaaggtgccgcaatctccatacggttccctgacaggaccatggcatcgttgcgacatctgagccaattaggtgtattcccggctgcttggctgccgatgttcgtgggactggtgcgcagacatgccacagtgctgattaccggcggaacaggcgtgggcaagaccaccttgctcaaggcgctgctggcgcaatgcgatgtgaacgagcgcatcgtcaccgtagaggaagttcgtgaactgggagaactggggcgtggcgatcatgtgtcgttggtaacgcgcgaggcgaatgtggagggcgtcggagccataagtctgacggacttggtcaaagcgacgttgcgaatgcgccccgaccgcgtggtgctgggcgaatgccgtggcgcggaaatcgtcgacctattgcgcgcgttcaattctggtcatcacggtggcatgaccactgtgcatgcggacggcgtgaaccgagtaccgtccaggctgatttcgcttggattactcgccggagtcagtccacaggcgttggccatgctggcggcaggcgctttcgacgcggtggtgcatttggagcgagtgaacggacagcggcgtatcacgcagatcggcgaactgcgtgtagcacatggtgaactggcaggaacaccgctggcggtatggaatggctgccatcctcctcggtatgccgccgaatgggggcacttcattgaacgatggggcatcgttcccgggccgagtggtggtgggtgatgatgtggtgtgctgttctggtggcgctcgccgtgctgatatggccggggaacaagtccgggaggctgtatcggctggcttaccgcgggcgtgcggtcgattccgcagccataaacgaacctcgatatgccggctcacctcgcgtgggcgttgcgcaggtgattacgtccgccatcgcgcgattgcgaggtggcggcacattggttgaagcattcgaggaacaatccagcagacgcttcgccactcagcgcattactgtggaacggctcataacggtgttcgaacagcggcgtctgcccgacgaatcaccagcgcaggtacttgaagctgcacgcggggtcaccgccgcagcggttttgagcgatgagctcggttgccaagcagtgccatgtctggaagcggtattgactgcttaccggcagatgaggctgatgcagaacctgcgatcgcaagcatgtgccgttcctaaagccactgtggggctgctgagcgcgcttccggccgtcactgtggcattgggcgagcttctgggagctagaccattggcgttcttgcttggatcgccacgcggtgtggtctgcttggtattagggggatgttgttatgctgccggcttggcatggatgcgggcattgttgaaaggcagcggattatgagtacggtgtgggtacacgccgcggcaggctgtgcggcgatcgctagttggctgtataaggctccgtctcgtcatgacagccgcttgccgggcgaggaaccggccgtagcgcatgattgcgggtcgtcatggaccatactcatattgcgtatgttgcaggtgtccttgcgtcagggctcctcgattccccgggcgcttgacatggtgggcaaagccgtcggcggcgactacggcgctcgcatgagcgaggtcgggagctccctggccagaggggttccctgggctgatgcgtggcatgccgctatggctgttcagcatgagggtgcgccagctgatagttcatccggaaaacgtaccagcagaacgcaacgagatcttggcctgctgcaatcggctttggaatcgtcatggacgcatggcgatatgcctggcgtgcgcctcgaatccgccattgaacagctggaccgtgacgagcgtgccgccatcgaacggaatgccgcgaagctgtcggtaaagctactgatgcctacagggctatgttttctgccggcattcgtgctggtaggagtcattccggcgattgcgtccttcatgatgtgaatataggcgtgaactgagtgcgcttagggtgaatcttgttgtattgctcggtattgcacttggctgcgtttggttatccacattggtggtggacgacacgtcggggtgtggataactcggcaagctagaaccacataccccgttttccctggtgcatgaagcgttgatagtccacagtggtatgcaccccgcgtcaacccggcgcgggggccaaccactcacacacgcatggggaaggtgcgaagccactgcgcagcttcccctccttaccgaaaggaacgccaatgaatacccctatccccgtcatcgtcgacgggcaggccggcatctttgcgcacagcaaggctcgtgtggccacgctgaacgccaaggcgaaagaacggctatgcctcatggacgcacgcatccgcaccctcatggctgagcccgaagaaggcgcggccactgcggaatacgcagtcgtactcgttgcggctacaggctttgcggcggtgctggtcgccatcctgaagtcggatgccatcaagacgttgctgaccaacatcatcaaacaggctctgaaagtcgggtgacagccatgaagaccatgacatgccggtggcggctcgccagactgccgccagacctatgcacgggatcggccaccgccgaattcgcaatcgtattgcccagcattatcgccatcgccgggctgatattggcaataggacgtgtggtcatcgtttccatggactgtcaaagtgccgcggcagcggctgcacgcgagtttgtggttaccggtgacgaatcatccgcgcgcagcatagctgcggacgttgccgggggagagccccacgtcagcattgcccacgacggccaatcgacgagtgtgacggtcgaatgttcggtattgcccggtccgctggatgtaactccaacgcgggttaccggcaacgctacggcgataagccaataacggtcggctggctgggcggccgcaacagaaaggaactgcggtgcagggaatgcgttatgaggagggatcgggcacgatggccggagccatgctggttatggtggtgggcattgcgctcgcggtggcggcaagtgtgggcaacctcatgatctgccagaaccgagcgcgttccctcgccgaccttatcgcctttgacgccgcgtatgcgctgtggcatgcggatatcggtgatccatgtgcgctcgccgccaacatggctgaagcgaatggtgtagttttgggctcctgctccgtgcgggatgaagacgtgttggtaaccatcaaggtggaaaccatggtcctggtggcatcatccgtggagcggatggctcgggccggaccggtgagttgtacggaaggagacaattatcacaataatggaccgtaaagcaccgatactctggcgggcttctgggcctttggctaaggtgagagcatgagcgagagtgaacgcaacgagcgccgtcgcgtggtggccatggtgggcaaccccacttccgataaaggccgtggcgctaaggtggacgcgcaggtattgggtctgctggaggaagccggccgtgcccataacttcgacgtcatcgacatcaccggcacgagtttcgacgattccctgaaccaggcgcgtgaacgcgcgcacgagtacgactatctcgtagtggtcggtggcgacggcatgatcgcacttggagcgaacgccgtgggctgcagtggcaagccgttgggcatcgtggccacggggtcgggcaacgatttcgcacgaggactgaagctgccggtcaaccgtatcgaaaccgcagtggaaggtatcgtcggtgctatcgtgcgcggatcacacatcgatgtggacatgggacgcgtgacctctttggacggcggctatgccgtggatccctccactggcgaggagtacgagtaccaggagagcaagtccgccgagcatccgattgaccggtactatgcgggcatgctgtcctgtggtcttgacgcgagcatcaacgaccgtgcgaatcattcgcatctgccgaccggcaccatgcgctactttgcggcggtgctggtggagctgacgcatatgaagcgttatggttaccacatcaaagccacattggcggacgggaccacggatgaacgagacatcatcacaccattgctgacgattgcgaattcgaggcatatcggtggcggcattgaggtctcgccgtactcctgcttctccgatggattgttggacctggtgtggatggaccacgtgccgaacttcggcgaatgcgcggtggccatttcgaatgcctataacggcaagctacttgcttcaaaggtgttcggctggaaacgtatccgtgaaatcgaagtcacgcgggcaacggaaggagacgagccgccggtgctgatggcggacggcgaatatatcgggcatttgccatttagggtagtggccgaggactgcgcgttgcgcgtgctagtgccgccggccgtagccgcccgtgaggtggattcccgacaggaagtgctcaacgccattgcccgagatggtcgcgatcccgtgaccggccagttcgcgtgacccgattatattggctcccctcattaggctgagccgtaaagcaaacagcccagtgggctgtttgtaggcgagggttcgacgatagtcgaaccagaagaaagtcagccgtaggctgtccgcaattgcggacgagctggccgcgaagcggactgaggggagtgcgggagagcggtaccagagccaatggccgtcagacctcagacgacatagctttcgatatgcagcgtctgcgccatgacctctttgatggttcggtcgctgatgttcggatgcgagcgaatcagcgagataagccccacaatcagtgtgaagaacgtctcatggacgttggtgattggcaggccatgcatctgctcgaaatcacgtacggtggtctgggcaatgtagtcggcaatacggtccgccgcgcggtcaatgaacttgatatacagttcggcgttgccgtcttggatcatacggtttgagaaggggctctcgtcggcgatcagggagcggagcacatgcacgatgtcgtctaatgccttgttcacgttgcctgtttcgcgcgcttggttccactgcttcaacgtggtgaggatttcgtcgatgacgttatcgagtactgcgtcagctacggcttccttgtcttcgaagtagtggtagaacagcgaacgcgtcataccgacttcgcttgcgatgtcggaaacggtgattttggagaagcctttttccagacacaccttgcgcgcggcttgcacgatggcgtcgcgccgggcatcgccgcgggtggggcgtttctcgtcgagggtatcgctcatgggtgcctcctgaccacaaccgttattgacactatgttaatacaaagaaagcggttaataacaataaaaatgcggtaaccgttgtcaggtgaatgtcgttggaatataaagagttttccgattcggcaactatgagcccggtttatcttgactttttatcggttaattctgagggcaaaggtaggttagtagctatggcacttgcactgtatcgtcgctatcgtccggacaccttcgaaggggtcatcggccaggaccaagtcacggtcccgctgatgcgcgccttggacgagggcaagctcacacatgcctatctgttctcagggccgcgaggctgcggcaaaaccagctccgcgcgtatcctggcccgttgcgtcaactgtgccaaagggccgacttcccacccctgcggcgaatgcgaaagctgcaaggacctggccaccggcggtccgggttccatcgacgtggtcgaaatcgatgcggcctcgcacaacggtgtggatgatgctcgagaattgcgagaacgcgctggtttcgcccctgcgcgcgaccgctataagattttcattctcgatgaggcccacatggtcacgcagcagggcttcaatgcgctgcttaaaatcgttgaagagccgcctgaacatgtgatgttcatcttcgccaccaccgaaccagacaaggtgatcggcaccatccgttcgcgcacccaccactatccgttccgtctggtgccgcaggaagtcatgggtccctacctggagacgatctgcgacaaggaaggcatcaagcccgagcccggtgtgctgaaactggcgatgcgcgccggtggcggctccatgcgagataccctgtccgtgcttgaccagctgatggttggttcggtcgaaggcgttatcacccatgatgccgctgtagccctgctcggcttcacgccggaggcactgatcggtgaggccgtggatgcggtaatcgatcacaacggcgaagccctgtacggcgttatccagaaagtcgtggtcggcggattcgatccgagacgattcgtcgaagacctactggctcgtgtgcgtgatctgctggtgcttacgttggccggggaccgtgcggaatccgtgctgtccgacacggctgaggccgaggatatggacgatctgcaccgccaagccaaggcgctgggactgggcgcactgaccgcaatggcagacatcatcaacactacgttgggtgccatgaccggagccatttctccgcgtatgcgcttggaactgctggccgcgcgattgttggccggcagtgaatcaggctttgcaacagccgctcccgcgccagcttcttctggtatgccgcctgcggctgcttcttcgacttcgactacgccagccgcttccggtatgggtgccagtggttttgccggcgcatcgcgaggcgggtttgccggagcctcacatggcggattctccggtgctgcacgcaaccagcaagcagccgcgcctcagagcaccgcttcccatgaatctgttggaggcaatggccctgtcaacggcccggtcagcgaccgacccgcgggctctctgtctgtgcaacctgctgtagcaactgctgctgccggtgccgctcctgccgccaatgccgggtggggcgcgcccgccgcgtcgccggccgtcccggctcaaccggtgacctcgcctgcggcatcggataatcggtccatcgacgagaagtgggatgcagccgtcgccgctttgccggaaaccattcgtgaatatgtgtcacgagacaaggtgccgaccgtaaaattcggccccaaccgtaagggtctgccttgcttgtcgatgacgttcgacaagtcgctgagccagcacgctttcgccttggccgtggataacagcggtaagaaggcggcggccgtggtgatggatgccgtgcgcaacgagttcggcgccaatgcggttattgcaccttctgcggtcgcggcgaatggcgagcgagtcgaatccgtcaaacgtatgagcccggagcaattggccaaggtcaagcagcagattgccatggccaaggctggattggccgcgtcgagtttgggcgcgagcctgggcattcatatggggagcgagacgaaagctccgaagccgactgcaacaggccaagccgaggacgcagacgacagccatcgagccggacaatccagtgcatccacggcagcgaagaactggagtgacgatgacccttgggccaagccggccgtaagcaacgcttcgccgcaatctgcagacggggtcgcgcctaacgagcccgctgctacgcctgcgcccgaagagcatcacaagaagcatgttgcggttccggacatcagtgacggtgttgatccgtgggccgctccggctgctcctgttgcacccactgcgtccgttgcgtccgctggacccactggacagtccactgggcagccagccaccgcatcttccgttacggcagttgccggcgcgagcgacgatccatggaatcagacgcagtctcaggccgcggtctcaccggcgtcgcaaccggccgaagccgacccgtggaaccagccatatcagcagtctcctcacgatgatccgtggaatcaaccgcaggggaaccatgctcaggcggctccgcagccaggagacgacccgtggaatcagcctcagtcccagactccggcttcttcggttcctcagacagtgtcgggcaatatgtcgggcgatgacccgtggaaccagccccaatcggttccgcagccggctgccggcgatgacccgtggaatcaaccgcaggcagttccacaatcggctccgcaggccaccccgcacggtgacccgtggaatcaaccgcaacccgcacagccgaccccgaatgccgacccgtggaatagccagccccagccccagccgaaaccacaaccgcaagtcgcggccgaggatgacgaatactcgatgagcgaccagtcgctcggcgaggcgacggccatgaatctcgacgatctgaaaaagctattcgaggtcaaaaaagtcgagcaattcgcggcagatgatccgaagaaccccaagaacatccagcctgccaagaagcactcggatgaataatgaggacgaataacgaggaatacccatggcacttgcttatgacggcgcaatacaacgactgatcgacgctttcgggcggctgcccggcatcgggccgaagggcgcgcagcgtatcgccttctacatgctgtccgcgcccgaagatgaagcgcgcgatttggccgaggccatcgaagaggtcaaggccaagatccgcttctgtgatatttgcggcaacgtgtgcgaatccagcccctgcccggtatgcgccgacccgagacgcgaccgttcggtgatctgcgtggtcgaagagcccaaggatgtgatgagcatcgagcgcacgcgcgaataccacggcctataccatgtgctcggcggcgcaatcaacccaatggccaacgttggccctgccgacctgcgtattcccggtctgctcaaacgcttagaaggcgatgaggtcaaggaagtgattatggcgctcgacccgaatattgaaggcgaggccaccaccagctacttgacccagctattgcgacccgtaggtgtcaaggtcacccgacttgccagcggcctgccggtgggctccgacttggagtatgccgacgaaatcacgctgggcagggcactggccggtcggcgcgaggcctaagccagcgtatcattggcgctttcgcccttgcggcgcatccacggccagaatgcgccgtggcggatgatgcgcgcggccttgtggcgtcgtgccaaccagataatgaacagtcctgccgccagtatgcctagaccaacaccaagggcgatattgcgcgcgtcaagcacgtcattcggctcgggggccggcatcggaatcgccacgcggtgcccggagataagcagtcggtgcgtgttcacgccgtatggcgtacaggtcatcaaagtgacgcgatcctcacccggcacgatcttgagcttcgacgtgtcatccggcaaaatcaccgaaatgcggtccactttgtagcccaaagtttcgcccatgacttcgatgtagaagaagtcgccctctttcacctcgtccaaacgggtgaacatcagcgcttcaaccaacccgcggtgcccggtaatgaccgaatgggtggatttacctcccaccggcagcgacgtgccgtacaagtggccggcaccagaagccagtgcttcctcggaagtgccgtgataaaacggcagattgatggactgcttgggcaccttgattgtgcccatcacgccgttgccggtattaagcagtgactggtattccttgtctttctttgaggcggaatcctcgccgctggcttgggatcctccttgagcggcggcgaacggatcgacggcttcacccaagataggctggccggattcagcgagcttcttgttgtatgcgcgggccgccgtgagcttgtcttccgcctgcgggtaaggccagccagctacttctttggccgtggtggctgtggtggcggccaagttgcggtcggactcgaattgcaacgctagcgggaagcaggccacggcgattgcggcgatcagcagcacaatggtgatgatgcgcatcgcccacaggttgcgttgcaggcgtcggcgctcggccacgagatcgctgatatcgatgacttcgtcaaatggtgttggaacgaatgctgcgggctcgggccgcgctgaggaaacgttgtcatttgcagatgcgtcatccggcatggccgcgttgttttcccacattttctgtgaggcacgcttactcgtcgaacgtcgatgcagcaatgccatagtcgcctgttccttcgcttgatctgctcatgatttgcttatacaagacggccgggtccgtcttagtcgtgcatggcataggtgctgtcgcaaatggcaacaccgcacgcgccacactgcgaaacgttactccgcaccaagcctttcatgcaacatgccgacggggccatataggggcaatgtagggggcataagaagtctgaaaatgcgatacgaacaacgttgctacggctgtcagtgatgcggcttacttcggacaagccgttgagatgcaaggggatgcaaaggattgcaaagtatggcaacatgataagtcgcagcgtcggcgatatttggcagagctttcaaataggggggtatgaatgcataaagagggaatatgttacctcgataaaagaggcgctattgctgttttcgtggatgtcggttcgtcgtcgagccgttggtttcgtaggcgtgaggggcgttcccgcgtattctgttttccgaccaaagaaatgaatcacgaagaacgcctgagcaaaagctcattcgccggattgccgaacgtcaaaggcgcggttgcagaggatgcgcggatcacggattcgccgctgcgttccgaattggctagtgtgatcagagaaaagatggcactgtctgggcatctctctttttaggtcaaggaaaagggtctggcgataggcggtgatgacgcccatcgtgttggtggcactgttgctgcaaaaaggaaaagtctagttcgtaatctagtgtccaacttccctaataggaatggtccaacttccacaacgaaaatagtccaacttccacaattagaatggtccaacttccgcaatagagtgatttataggttgatgtttcgacggtttgcgggagggcacatatggcagtggagagctcggagattcaacgtggcgagtaccttcctcgagtggctgatgggttgctgactcaggcattgcagtcttctggtgccgttcagattaaaggtccaaaatggtgtggcaagactgcaacggcagaaaggcagtcggcgagtcaggtcttcatgcaggacccggatcgcagtgctacgctgttggccttggctgatacaaagccttctctcatcctgcgaggtgaggagccgagactcattgatgaatggcagatggccccgcaattgtgggacgcggtgcgtttcgccatcgatcgagggcgcggtcgtggccgattcatcctaactggatcggcgactcctcaacaggaaccagctcattccggagtgggaagaattgcccgattaaccatgcgtaccatgtccttatttgaatcgcaggaatcgacgggcgttgtttcgttgggagagttgttcgatggcaaccatgatgtttcgggtttctccgatttcgatattgaaaacaccgcgtttgcgctatgccgcggtggctggcctgaagcagtagtcgaatctcgagtaaatgttgccttgcgcatggccgcggattatgtcgaagaactacttgattctgacatcaatcgtatggatggtataaagcgcaataaaacttggatgcgtctgattatgcgctcgtatgcgcgcaatatttcttctcaggcgtcgcaatccactatcgcggcggatatgcagggtgaaccgccttcggaaggtacactctccgattatttagatgcattgtcgcgagcttgcgtaactgaagatcttccagcttggaaccctcgtttacgttctaagactgcagtgagaacgagcccaaccagacacttcagcgacccgtcgatagcttgtgcggtactgcacgcgaccccggagaaactccttaatgatttcgagacctttggcttgctgtttgagtccatgtgtattcgcgatctgcgtgtgtatgctgatgcgcttggcggagatgtgttccattatcgggataagacgggattggaatctgatgcggtcattggcctgcatgatggacgatgggctctcattgaggtcaagctcggagaaaagcaggttgatattgcggcggcccatttgaaaaagttggctgacagaattgatcaagatcacgaaggccgtccgtcattcttgatggtgctgaccgctacggctgccgcttatcgccgggatgatggggtattggtagtgccgttggccacgcttgctccgtgagctcgtatcgtgcgtttgacccatcgttcccaacacaaaaggaaaaggcccgggctgcgggaccgggccttgaaaaggagagaggaagaagaaggtattcagttatggggtctgcggaaacctcgccggtttgctttcgtttgccggtaattgatagttaaccgctcgaatctcaaaggatggatgcggctgcctcaaagaaccaccggtgaaaacttgaatatttgctgaacaacgtaggccatgcccgtgtccacatgtcggcgcggggtcgcggggtgaacgcggcaacctttataatcgttgcgtttgcgtagaatattgagcaaactccccctaagagaagaacaaaggacagcagtggctctcatcgtgcagaagtacggcggttcgtcggtcgccgataccgaatcgatcaaacgtgtggccaagcgcgttgttgagacggaaaagaagggcaacaaggtggccgtggtggtctccgccatgggcgacaccaccgatgaccttatcgatcaggcgctgagcatcgactccaacccgcccgagcgcgagatggacatgctgatgaccgcaggcgagcgaatttccatgagcctgctggccatggccattcacgccgaaggcagccgtgcccactccttcaccggtcagcaggccggcttcttcaccgacgcccgttacggcgcggcccacatcaaggccgtgagaccggaccgcgtgaagaacgcgctctcattgggagacatcgccatcgttgccggcttccagggcatcaacgccaagggtgacgccaccacgctcggccgcggtggttcggatacctccgcagtggcgcttgccgtggcgctcggtgccgatatctgcgagatctacactgacgtggacggtatcttcaccgccgacccgcgtatcgtgccttccgcccgccgcattccgtccatcgattacgagtccattctggagatggcgtcctgcggctccaaggtgctggcactgcgctgtgtggagtacgctcagcgtttcaacatgccgctgcacgtgcgttcctcgttctcccgtcgccccggcacattggtggtgcccgacggcattgacccgcgtacgctgccgaacctcgactgagcgcggctacggcgaacgataatcgtaagtaatttcaagcaagacaaggcaagacatgactgaagaagaagcgaaatccatgggcgacctgttccctgacctaggccccgaggcaccggtgatttccggcattgcccacgatcgttccgaggcgctggccaccgtgcgtggcgtgccgaacgagccgggtatggccgccaaggtgttcaccgagctggccaccgccggcgtgaacgtggacatgatcgtgcaggccggcgcatccgtcggcactgcggacatctccttcaccgtgcccgaatcggccgtcaagcaggttcagaacacactgctcgacaagcaggaagtgctgggctaccactccttcgatgtggacaccaacgtaggcaaggtggccgtggtgggcgttggcatgaagacccatgccggtctggccgccaagttcttccaggccctgagcgatgagggcatcaacgtgctgatgatttctacctccgagattcgtatcgccgcgctcgtgccgctcgatcagctcaacgacgccgtcaaggcgctgcacaccgcatacggtctcgatgccgatcaaatcgaagccgtggtgtacggcggtactggccgctgagccactgagccgcgtttttgcggtatatacgacgaaagccctccttgcggagggctttctcagtttcggactcagtttcaactacttcttggtgatgtagccgagagccttgagcatttcggcgcattcaagggcaccgccggctgcaccacgcagggtgttgtgggccagacccacgaacttccaatcgaagatggaatcctcacgcagacggccgatggaaacgcccatgccaccctcgtagtccacgtcgagcttgacctgcgggcggtcatcctcggtgaggtactggatgaagtgcttcggtgcgtgcggcagctccagctcggaagccttggacgtgtagttcaccagacggtcgatgagctcttccttggtggccttcttgccgaagttcaggaacacggtggcggtgtggccgttgagcacgggcacgcggatgcactgggaagtgatcttgaggtcgccgtcgaacggcacgatctcgcccttggcggcgtccacatggccgaacaccttgagcggttccttctcagactttgcttcctcaccggagatgaacgggatgatgttgcccaccatctcgggccagtccttgaaggtcttgcccgcgccggaaatcgcctggtaggtgctcacaaccacctcgcgcggctcgaattccttccacgcggccagcgccggcgtgtaggcctgaatcgagcagttcggcttgacggcgataaaaccacgagtggtgcccaggcgcttgcgctggtgctcgatcacctcgaagtgctccgggttgatctccggcaccaccatcggcacgtccggggtccagcggtgggcgctgttgttggagaccaccggggtctcggtcttggcataacgctcttcaatggcgcgaatctggtccttcggcatgtttaccgcagagaacatgaaatcaacgccagaggccacggactcggcatcgtcgccatcgacgaccaccatgttcttgacatattcgggcatcggggtttccatcttccaacggtcgccgacagcctcggcatacgtcttgccggcgctgtgcgcggaagcggcaagcgtgaccacctcgaaccacgggtgattctcaagcagcgtgataaaacgctgaccgaccataccggtggcaccaaggatgccgaccttcaatttttcggacatgatgacctctatgacctctgggtttcgatggattacttacgtcggacggccgtcatgcgggtggccgtaaaacaatgcaattgtacgaaacacgcggaacaacggcagtggtcttcccagatggtggctgcccaatgaagcgaaggcgatgttctacactggtagccatgtctatcgcatcagtagaggcccaaaaacagctcgaccgtatcgtggctctcggctacccggatgtggcggatatttccgccgccgcattccgctcgctggcccgacctctgatcggggcgctcgagcattccgatttgggatcgaacatcctgctggtgcccacgcgtgaactggtttcgcctgagtcgctgattgcacgaacctccatcaatcgcatggcaggcttcaccaccatgccgccgcgtgacatcgccagcttcctgcctcaagacggcttcatgccgccggaaggcccgttctatctggtcgtcaatccgcacaccggcacgtgctatgtcaatcgcgagccggatgtggcccgcaaacttattgactccgatgagcgcctgccgctcaccctcgaggaaggcttggccatcgccacccagcacccggagtggctgctggaaaagaacggcttcaatctgctcggctcacgctccgcagacggacgcgtgccgagcatctggatgagccagaacgcaccgcgactgggagccgtctggcccaattcccgccatacttggctgggcaacgcgtattgcacggcccgtcgcggggtgagcctgtttaagtaggtttagcgcgcggccttgatcagcgaacggatgatggctataaagccaaggctcatcgcgccggccaccacggcgaacacctgcgggcggcgcagctcgttgcgtgcgctgaccgctccggtaacgcaatgatcctcgaaccagacgcgcagctcgttgctggagtagcggccgaccagattaccccatgtgagcgtgcgggtcacatagcccgccggattgctctcatggaattcaaacaggcgaatgccgcggtaccgcgacttgggaccatagcattcgaacccgcacgtgggtgcatagcccagatcgatatcatgcacatgaccaacgaaagagttcttatggtcatgcccgcagaacagcgcgaaatagccgccagcctcgcgcaaggcatccacctcgcccacattctcgtccgcgcagccgatcgcctcgccgagccgcgagccggggcggcagacctcatggttgagcacatagcaacgcccggcgtgcgtgcgcgcgccttccacggcgttcggcgtccatgcgggcacttccttcagacaatcgtagaattcctgcggcggaatgtgctggaaggcgatggccggcacgggcttgccgtcgccattgcgctcgcccaactcggtttggacggaccccagccattcgatggccttgggggtgggggtgccgtacccgtcggcgtcggccaggtcgagtcctcgcggattgaccacatacgccgggtattgggcgtcgttttcttcgggtttgccggcataatcgcctgaattgaccatcataacggacatggccacgcggccggaaccatcggaggactcgacgggcagcgcgaacgtgccgggctcgagactgtcgtcggggttcaggcagccggggtattcgcggtagatgtcatcctgttcgtcggccagaatgccgcattggaagtcgtggttgccgtaggtggcggcaaagggcacgccggcctcgacgaccggaccaaggaaaccggagaacgtgcggcggaccttttcgcgggtctcaatcatgagttcgtcgagggtcgccggcgtctcgtgtgcggggctggccttgccggattgcgttgaatatacgagggtggaaaccgtctcgggcgtggggctggtctcaacggaatcgcctacttcggaagtcgtgatcacgtcggtcgaatcggcgccggcagcggcgacggcgttcgtcacggtatcggggtcaagcagcgcggctggtacaggcttgccggcttcggtgagacgatcggccacgcgatcggatgttttgcgaattacggggtgacgcttgatcccgcggattttggcctcgatctcggtgaccgcgcgcacgcgagcgcccggctcttcgccgcggcggcgcaggaacgtgtcgatgtaggcgggatcatagccgcggatctggtcgccggtgaacaccacaagatccggatcggcttcgcggatggcctcgcggatgaggcggatggtgtcgggcaacacatcggggccgtcctgtacgtcggccatttgcagcacgcggaagctgccgtcttcgcggaatcgcaagctcgtcatagctcttcagtctatgttgccgggcggcggatcgcccgcgcgttcacaggactggcacagcaagggacggggcagggcggggtgccgcagccgtgttgttgcttgatggtgccgcgattttgtcatgcagcgtcggtggagatccagacagcgtccctatgctgacgttctgagaccattggcgtcgttactgattcatggaatggcccggcgccgacgctcaaagaggctagcgtcggcggtgggccaatatttgtcgcgttgccgatggttgtgggcctcgtagcgtcggtagtgtgccatagcctggcaatttgccgacgataagctttcccagagtcggtatttcgccataagttggtccgctgacgacgctgagccgtttggctgtcggtgcagtaccaatatttggcccgccgccgacgtatggagggccatctggtggggtatcgcaggcggggtgttgtgccggagtcaaagcgtggcccggcgccgacgctgagtgccctcatgtcagccaggtgcataagcaaatgccacgatacggcatttcccgcgggtttgcccgaaccggcctgtaggatgttacgtgcgtattgacaaatccgcgtggcccggcgccgccctggcacaacgccgcagtcgcgtccgcaagagggcccgcgcaataaccagtaaaggaggaacaatgggtcaggatcaatcatccgtttttgatctcgcagcggtagccgccgcgtccaatggggggaacaacgacccgctgctgcctccggcgcgattcatcggcgatccgcagaagccgagtcgtatgccgtacaacaagtacgccgcctacgacaagcaaatcccgtttgattacccggagcgtacgtggccgggcaagcgactgcagcgcgcgccgcgctggtgctccgtcgatcttcgcgacggcaatcaggccctcgtcaacccgatggattccgagcgtaagctgcgtttctggaacctgctcgtctccatgggattcaaggagatcgaggtgggcttcccgtccgcttccgagaccgatttcgacttcatccgtatgctcatcgagcgtgagctgattccggacgacgtgaccatcgtggtactcacccagtgccgcgagcacctcatccgccgcacttacgaggcgctcaagggtgccaagcgcgccatcgtgcacttctacaactccgtgtctgtgttgcagcgcgaggtcgtgttccgcaagaacaaggaagagatcaagaagctcgccaccgacgccgccgaactgtgcaaggacctcgagaacgaggccaagggcatcgacctgtactacgagtactcgccggaatccttcaccggcaccgagccggagtacgccgtcgaggtgtgcaacgccgtgatcggtgttatcaagccgactcccgagcacccgatgatcatcaacctgcccgccaccgtggaaatgaccacgccgaacgtgttcgccgacgaagtggagtacgtctccacccacctcgacgaccgtgactccgtggtgctctccctccacccgcacaacgacgaaggcatgggcgtggccgccaccgagctggccgtgctggccggcgccgaccgcgtggaaggctgcctgctgggcaacggcgagcgtaccggcaacgtcgacttggtcacgctgggcctcaactggctcacccaaggcatcgacccgcagcttgacctgtccaacgtgcccgagattcgcaagacggttgagtactgcaaccagatcaagatttccgagcgtcacccgtacgccggcaacttcgtgttcactgcgttctccggctcgcatcaggacgccatcaagaagggtctcgaggctcgtcaggtggccgccgagcgtgttggcgccgatctcgacagcttcgtgtggcttgtgccgtacctgccgatcgacccgaaggacatcggccgcacgtacgaagccatcattcgcgtcaactcgcagtccggcaagggcggcatggcctacctgctcaagaccaaccacaatcttgacctgcccaagcgtctgcagatcgaattcgacaagatcgtgcagaactacgctgacacgaccaagaaggaagtcaaggacgaggatatctggcgtctgttcaaggacgagtacctgccggtcgaacagtccggcatgaccgccgccggtgtggttgtgggcgatactcatgacgcctcgctcgtgccgtggggccgcttgaagctgctcaaggtggccgtcagctccggtgaggatggctccgacaccgtgctcaaggctcgtctgctcgaccgcggcgtgaacgtcggggtcgatgcgcccgtggagcgcgaggtctccggcatcggcaacggtccgatcgccgctttcctcaacgccatttccaactttggcgttgacgcctcgattatggattacgcggagcacaccatgtccgtcggcaccgacgccatggccgcctcgtacgtggaatgccaggtcggcgaggccgatgacgcgcagatcgtgtggggcgtcggcatcgattcgtcgattaccaccagcgccctgaagtcgattatctccgccatcaaccgttcccagcgcaagcgctgagcgctaacagaacaaaaacaaggctccctctgattgcatcagggggagccttgttgtctgtgttttacttactactgggtgacgccgttggtgccggtgttcccgccggtgcctccggaattaccattatcgttgccggtattgttcccgttgtcaccgccggtattgttgccggcgttgccgtctccgccggtagtggtgtcgggataattcgggcactcggtggaatagctcggattggcgaggcactgctgggcgaactcctgagcctgctgttgcttcttggcttcctcttcggccgccttctgctgtgcgtcctgctcagcctgcttctgcgcgtcttcggtggactgcttgttggtgttgttggacaggccgttgctctgtcccttgcccaagccccaagtgccgtcggagccgccgatcttgccgttgtctttagcggtcgggaactgctccacctcggtgccttgcaaggcctgagccatgaactcctggaacaggtgggcggggtatccagtggaagagacgccgtatccggagaaggctggcaccacttgcggattgcccttatcgtccgggttccagatagcccacacattcatcatgctgggggtgtatcccacgaacgacgaagccatttcgtcgttggcggtaccggacttgccggcgacgggtcggcccaacatgctggatgtgccggccgccgtaccgtacgtggtggtgccctgcatggccttctgtaccaaagcgcagtcgttggcatcgaacaccttggtgccgttgctgggcgcgttgtacatgtccctattgttggaatcaagcactttggacaccatgtgcaaggtgttcttcacgccattgttggcgatggtcgaatggccttgcgccaaatcccacacggtcagggcgttgatgcccagcacgttgtacatggagttttcatcgatatcgccctgaatgcccgcttcatgggcgattgcggccgtgcgcttcggcgtcagatgctcattgacgttcatgaacaccgtgttcaccgagttggcggtggcctgatacagattgatgttgccccagttgttctccagagcgttattcacctcttggtccaagccggtgaagtgctggtgggaattgccgttgaacaatgtatcgaagctgatgccggattgcgcggcccccagcaaagcgaacggcttcatagtcgaacccggttcgaatacggcctgatcggcattgttgagctgcttggacagataatctgaaccggcgtatacggacaatacttcaccggtcttcgggtccagcgctatgccgccgatttgcagggattcaggcatgtcgtccagacgggtgtcgccgatggactgcataagatcctgcttgctcttgtcgatggtggtgatgatcttgtatccgccagtatccaaatcctctttggtaaaggccttggactgcaccagctcacggcgcaccatatccaacagataaccgttcggccccgcgtattcgttctgctgcgccaccgcggcggtctgcgggaacttggcatcagtgtgctgcttggcagtgatgtaaccatcctcctgcatgatgttcagcacacgcttgaagcgcgatttggccatatcggcgttatcggccggatcccacgtggacggtgacggaataatgccggcgatcatcgccgcctcagacagcgtcagatccttggcgtccttattgaagtatgccttggccgctgcctggataccgtaggagttgcggcccagatagatggtgttcatgtaattgcacagcacctcgtccttggattcggtctgcgcgattttgatggccatgatggcctcgcgtgccttgcccacataggatgtggtttcgcccatgtaataccgctcggcatactgctgagtgatggtggaaccaccttggcgcgtgcccttggtcacattattaatgaatgcgcgggcgatgcccttcagatcaaggcctttatccgtgtagaacgtacggttttcggacgccacaatcgcgttgccgatgtagtccggcagcccctcgcaagagatgatttcacgattctgctccgcgtaggagccgatcgcggtggtgccgtccgcgtaatacacggtggttttctcggccaacgcgaacttttcgggttgcgggacctcggtggtggtgtacaggtatgcgaatactgcgataccggccagcaagcccagtccaatcagggagaagaagatgcccagcacccatttcagtacacggtgtttgccttttcctgtgttctttttcttcctgttcggggctcgatggctattggaagccttgtggcttgcgtggcgggaacggctctcctggggcgtataggggccctcctgtgcggagtggccggctctgctttgcgcggtgcgcggttgcctcagagcggggccattgcctcccgaatgtgcacgacgagtataagaagccatggtgtccaccgtaactgttggccttgaacaatcgtttgacgtgagcgtaaccacacgcatttatgccggtatttttccggaattcttacaattgggcacgcttcttgatgttgcatgaatattgcctgaatgcgctggttggcctgccgtgcgacccggcgcgtacgtttcgtgtcgctgcgctggtccatacgtctccatagacttatccccagcctccacgcggcgctatgtcacccaactcccccagggcaggaatgcagcaagggtaagtggcctctgacgggtgcgtggaggttttctttatgtgcggatttggctgtgagctggcgctagcgtggtcccctgtccggggcgcggccgtacagtcgaacgtatgaatgacgcacagacccctagaattcgtgacccgcatgcggcggtcaatctggtcggctcaggcgcagcacagcctgactcgtcgtcgaacgttgttgacccattggctgcgctcggcccggtctccggttcagatgcatcggcatccacatcaggctccttacgggatttcaggccgctggacatggacgatgcggatggggcatctgatatcgaccgcggcttggcccggcttgacccgcttaccgtgcgcccgcgaatctccagccgcgtactgtgcgtggtattcggtctgctcctgatcgctatcggcttcggcgtgtggtgggggtgcgtgcttaccgaaaacggacaatcgtacgacgaactggtctggaaaaacctgcacaacgatgcaccgtcctggaccaccggcgtgatgaacgccgtcgcacaatcctggctggttatcgctgtcagctgcacaattgccgcaatcggcattattacggcgctgattcgacgccgctggtggttggccgggcaaatcgccgtgttcgccgtggtctgcttggccgtcacccgtatcaagggtctgttgccgcgtccgttcatcatcaacactgaatcgcctgccgctaattccgcgccttccgggcacacgatgctggccgcagcctgtgcggtgattctgctgcttaccgtgcctcgtgcggttcgagctttggcgggcgtcatcggcgtggtttgggcggtgaccgtcggtgtctccgtgatatacggacaatggcatcgcccttcggatgtggcgatgtccatcctgctggtggcgggattggccctgctcgctctggcagttacgcgcaagtccggcatggacgagccgggtcgccgcgtctcctcagtgagcgtgcaaatcgtcggcagcgtgctgattaccgggggcctgctgttgctcgcctacagcggttatgtgatctggcaggtggtgccggggctcaatgtcagcgccagctgggcggttcagggggcgaatgtcagcgctgttgtgggcattgcgggtgtggccatgctcgcattcggactgttgctggccctgcgtcagatcactgcagcgcccttaagccggctgggtctgatcggcgctccgccggcaccgcccaaacggtaaaacatggggtgcgaacggccgaatttgcccggcacaacggcggaatttggcagttggacatgattcatgagtattatgacgccagaaacgtcgtgtgtttcgcgcaatacataaggagtgggtatggctaccaaactggtgattgtggagtctccgaccaaggcccacaagatcggtgactacctgggcaaggggtacaccgtcatggcgtcggtcggccatatccgagacctcgcgcagcccagccaggtgcccgcggcagacaaggccaagttcggcaagttcggcgtggacgtcaacgacgggttcaagccgtattacattgtcgacggcgacaagaagcgtacggtcagcgaactcaaatcggccctgaagaacgccgatgaactctatctggcgactgatgaggatcgcgagggcgaggccatcgcgtggcacttggtgcagaccttgaaacccgaggtgccggtcaagcgcatggtgttccacgagatcaccaagaacgccatcaacgcctccctgaacaacacgcgcgatgtggatggcaatatggtcgacgcacaggagacccgccgcatccttgaccgtctgtacggctatgagctgtcgccggtgctgtggcgcaaggtgggcccgggcctgtccgccggccgcgtgcagtccgtggccacccgcctgatcgtggaacgcgagcgcgaacgcatggcgttcaagcgcgcgccgtactgggatatcgtcgccacgctgtccgcgcctgacgcgctgggggatcgtgccgaattctccgcccgcatgatcgcgctcggcggcaagcgactcgccggctccaaggatttcggtgccgacggccagctgaccccggacgggttcgcggcgaacgttcgccagcttgatgaggctggtgccaccgccgtggcttcggcgctgaagaccgccgatttcactgtgatgtcgatggaaaccaagccgtaccgccgccgcccgcagccgccgttcaccacctcgaccctgcagcagaccgccggcaatcgcctcggcatgggtgctcgcgccgtgatgcgcgcggcccaaagcctgtacgagaacggctacatcacctatatgcgaaccgattcggtgacgctgtcgcaggagggcatcaccgccgcccgcaacgccgtctcctaccatttcggcgacaagttcctctccgccgagcccaagcagtacgccaccaaaaccgctggcgcgcaggaagcccacgagtgtattcgcccggcgggctcgcgcttccacgacccggacgagctggcttccaaacttcccggcgaccagctgcgcctatacacgctgatctggcagcgcacgcttgcctgccagatggctgacgccaccggttccaccgccaccgtgcgcctgtctgcgccggccggccccaccgagggcgaggccgtgttccaggcgtccggcaccgtcatcgaattccccggctttatgaaggccacgggggagggacgcaagcccaaggccgccgctcccggcgctggggctggctcggaccaggctgctgccgccggcaagacggacgccaaggccgtcaggggtgacgcctccgaatccaacacctctctgccgccgatgagcgtcggccagcaggtcgaggcaagcgacatcgaaccggacggccatgaaacccagccgccggcccgctacaccgaggccacgctggtcaagacgctggaagccaaggagatcggtcgcccgtccacttacgcgagcattatctccacaatcatggatcgcggttacgtatacgagcgtggccgtgcgctgatccccagctggctcgccttctccgtgaccaagttgctcgagacgaacttccccaagctggtcgactaccagttcaccgccgagatggaaaacggccttgaccgcatcgcccacggcgaggaatccggccgcgactggctcacccacttctacttcggttccggcgagggcgccgcccgcaacgccgacgaggcgcacgaaggcctgcaacagcaggtcgcgcagctcggcgagatcgacgcgcgcgccatcaacaccatcgacatcggcgacggcctgcacgtgcgcgtcggccgttacggcccgtatctggaagacatggagcatctggacgccgaaggcaacccgaagcgcgcgtctctgccggacaccatcgcgccggatgagctgacggtggccgtggcccgcgatttgatcgacaaccactccggtggaccgcgcgagctgggcgttcatccggtatccggcggtaccgtcgaggtgcgcaatgggcgtttcggcccgtatgtggcgttggtgccgccggctgaggcttcggctggcgctgctggcgatactgctggtgcttctgcggccaagaagggttcgaagaaggccgcggccgccgccgcgtcgcgcccgaagatggcctcgttgttcaagacgatgagccctgaatcgctgtcgctggaagacgcgctaaagctgctgagcctgccgcgcgaagtgggcacatacgaggaaaccaacgccgaaaccggcgaggtatccgaatgcacggtggccgccaacaacggtcgctacggcccctacctgaccaagacgggtgccgacggcaagtcggagacccgctcgctggcctcggaagacgagatcttcacggtcgatatcgacaaggccaaagaactgttctcgcagcccaagtacggccgcgggcgtggccgtggtgccgccaagccgccgctgcgtgatttgggcaaggacccgaacaccggcaagaacgtgaccatcaaggacggccgtttcggcgcgtacatcaccgatggcgagaccaaccgcacggtgccgcgtcagtacacgcctgaatccatcacccctgatgacgccttccgactgctcgccgaaaagcgtgcggctggtccctccacccgtggccgtcgcggtgctgggcgtgctggtggcgccaaggccgttgccggcaagggcaagaagggcggtacctcggctgcggtttcggcgcaggaggccaagcgcgccgaacgccgtgccgaagtcaagaagttggcgaacaagggctggtccaaccagcgcatcgccgaaaaactcggttccacccccgccactgtgaaaaaggacgtcgactggctgaccgccaacgagggctacgagcgccccgccgtaattcccaagcgtggctgagcggaattattgctctacttgcgtttcaaggggctgatttctcgttttgagaatatctacttccgcttcaaggggctggtcatctgctgaaccacgagtatgaacggctccgcgccaacgtcattccgccgttttggaacgttgtctacttgggcaacagcccctcgaaacggaagtagaccttcagaaaagaccaaatcagccccttgaaacggaggtagagctggtttaactgcctgttgggcgcaactctgcgcctaacgctaaggtcaatagcatgaacggtctgtttgtttcgtttgaaggtgtcgatggcgtgggcaagaccacgcaagtcgagcggctgcgtgcgtatcttgaggctcaggggcgtaccgtggtcgttacccgtgagccgggaggcactgcgttaggcaaggccattcgccaactgctgttgcacggtgtggatgggggcgccgtcgacatcgcaccgcgcgccgaggcgctgctattcgctgcagaccgagcccagcacgttgccgaaaccatccgcccggcattggagcgcggtgaagtggtgatcaccgaccgctatttagactcttccttggcctatcaggccggtggccgcgaactcacgccagaagagattcgatccttaagcatgtgggccaccaacaacctgctgcccgaccgcacatatctgctggacatggatccggcgctttcccacaatcgtcttgagcatgccgaagatcgcatggagtcggccggcagcgacttccagtcccgcacccgtcaggcgttcctcgacttggccgcggccgagccgaatcgtttccgcgttatcgatgcgagccagagcattgaagcggtatgggctgccatcgaatccgacatcaaggagctcgcatgagcgtatgggattcactagtcggccaaaagccggtaatcgacatgctcagtcgtatcgcgcagggcgacccgagccagatcacccagtcgtggctgatctgtggacctcccggatcgggccgttccaacatggcccgagcattcgcggcggcgctggaaagcccggatcacggcatgagcgctgagcccacgcgcgtcacccagcaggtgcttgctggcacgcacccggatgtcacggtgctgaccacgaacaaggtgactattggtatcgatcaggtgcgtgagatcatcactacctccgagcagatgcccgccaccgcaccgtggcgcatcatcatcattgaagacgtggatcgcatgcttgagcgcaccaccaacgtgctcttgaaagagattgaggagccggccgagcattgcatctggctactgtgcgcgcccagcgcccaggacgtgctgcccaccatccgttcgcgcacacgcatcgtgaacctcgccgtgccctccacccaggcggtggccggattcctgacctccaccaccaatgtcgagccaaaagtggcgcagcgtgcggcccgactcgccgaaggccatatcggcatcgccaagttgtacgccaccgacgaacgggttatgtccgaccgcgatgaacttgtggtcggtgtgctgaatctggcccgtgcctcggatgcagtgttgttggccggcaatcttatcgacaatgccaaggcccaggccgaggcagacgcgaaccgcatcaccgccggtcaggaagcggaattccgccgcatcaacggactggcaccgagcgaccgcatcccgccgaaactgcgtggcgccttcaaccagattgccaagaaagacgatgtgaagcgtttggtcacccgccgtacgcgcgacgtattggatcgtgcgctgaactccatcgcttccatctaccgagatgtggcggtgctgcagaacaatgcggaggattcggtgggcctcatcaacctggagaaccgctcgtcgatcaccgaattgtcggtgcgattgaaccgggccggtgccgtgacccgtctggacgaagtggcccacgcccgcaagcgcctagccggcaacggcaacccgctactggtattcgagtccctcttctgcgccctgatcccataacccgacgcaactagcccccctctgatgagtgggggctgtcgagcgtagcgagactgggggagagaccccgtaacgcacagcccccagtacgtcacacatatgagcgatactgggacgtatgaagatttccgccgatttcaccgtcatcccggacgatttcgccaaggccgcggcccctgaatatttcaatggtggcgtgcctgtggtctccttcccgttctacatcgatgatgtggatcccgaggcccgctacctgcactgggagttcgtggacccggattcgattccggtctgcggcttcgagtggattcactggtccgtggccaatctgccgattgatgcgctgatgtacgacttcaatgattcgcatgcgttggccatcccgccggacttctcccgtcagctgccggccatgattcccgagaccgtgcaggggcgcaactcctcggcctccaagttcttgggccgcagcactgacccggcggtgatcatgcggtacaacggtccgcagccgccggacaaggatcatgagtactacctgcaggtgtgggccaccaagaagccgttgcccggcttgaatcagggcttctggctcaacgagctgttgcacgcgctgcgcaacagcggtgaagtgcccgacaccgacggcatcttcctgaccggtaaggcgtgagccacatgagcccccgcaggcgggggctgtcagcatcactgactgggggtgggtcagtacaaaaccaccttcagtccgacttcgtcgtccagctcccgccagtgggagcgtgaccacaacaaagaaaggacaccatcacactatggcctgcaccacgattctggtaggtaaagacgcgagctatgacggctcgaccatcatcgcccgcaacgaggattccgcgaacggcgagttcaacccgaagcgcttcatcgtcgtgaagccggaggaacagccgcgcgaatacaagtcggtgatctcccacctaaccatcaccctgccggacgacccgctgcagtacaccgccgtgccgaacgcggacctcaaggaaggtatttggggcgaggccggcgtcaacgaggcgaacgtggcgatgagtgccaccgaaaccctgaccaccaacgagcgcgtgctcggcgccgacccgttcgtggaatacacgccggccaagggcgatgagcccgaggtgcccggcggcatcggcgaagaggacttcctgaccatcgtgctgccgtatgtcaagaccgcacgcgagggcgtccagcgcctcggcgcgctgcttgaggaattcggcacctacgagatgaatggcgtcgccttctccgactccaacgaaatctggtggctggaaactgtgggcggccatcactggattgccaagcgcgtgccggacgaggcctacgtgaccatgccgaaccagctcggtatcgacgaattcgaccttgaggacgctctgggtgaccaggaagcgcacatgtgttccgaagaccttgccgaattcatcgaaaccaaccatttggacctcgcggtggagaacactaccccgttcaacccgcgcgatgccttcggctcccactccgactccgaccacgtgtacaacaccccgcgcgcctggtacatgcagcgcttcctcaacccgtacgacgaggtgtgggacggcccggacgccgaccacaagcccacctccgacgacatcccgtgggcccgtcagcctgagcgcaaggtgaccatcgaggatatcaagtacgtgctgagctcccactaccagggcaccccgttcgatccgtacggccagctgggcgatgagcgcacccgccacatgtaccgcacgatcggcatcaaccgccagagccagctcgcggtgatgcagatccgcccgtaccgcccgcaggcctcccgcgccatccagtggatggcatacggctccaacccgttcaacacgctggtaccgttcttcccgaacgtggacaccacgcccgcctaccttgaggacaccaccacccgcgtgacgtccgagaacttctactgggccaaccgcatcatcgccgccctgtgcgatggcgccttccgctccacgtccaacgccgttgagcgctaccaggagaagaccggtgcgatgggccaccgcttggtcgccgccaccgacgagcagatcgcccgtctgggcttgacggccgccgaggaagccgcgcagtccgccgctgaagaggaatttgaggccgacaacgtggatggcgatgtgcagccgatgaccccggacgagaccatcgccgcgctgcgtaaccccgaggtgcgcgagattctcgccgccgccaaccagaccatggccgaccagctcaaggaggaaaccgaaaagctgcttgactccgtgctgtacactcgcagcatggaaatgaagaacggcttccacatgtccgacttttagtccgtattgagctcccctccctgaggggctgagccgttaagaaaacagcccagtgggctgtttttaggcgaagaggcggcgactgccgccccaccaccccgccccatcacacaaacacagaaaggctttatatgaccaccatcgaagacttcaccagccagtacggtctggtccagaagatcgacgcattcggctacatgaagtacctggccgagaaccctgacgccccgcgcaagcacggcaaggtggtgctcgtcaccgccgatacgccgctcaaggcatcgcgcggagaaggcaagaccaccacgaccatcgccctgatcgacgctctgaacaagcgcggcattgatgcgaccgccgtgctgcgtcagccgagcatgggcatcaccgcagccggttccaagggcggtgcctccggcggcggcaaggcttccctgacccaccccgagctcatcgactggggtctgtgcggcgaaatgggcgccatcgaggcggcccagaacctgctcgtctccttcgccgagaaggccatcgatgacggcaagctcgacacgattctcgtgccgcgtgtctccgaggttccgagtcgctccctgcgctccaccgctgtggactacggcaagggcaacgtgccggagaaggtcgtgctcacgccgacctgcgagctcatgcagattgtggtgctctcccgctcgatggacgagatttccgagcgcgtgtccaagatgatcgccggcaccaaggacggcaaggccgtgaccttcggcgaattcgtggacctgtggcgtatcactggcattttggccgacgcggtcaagccggccaagaccgaaaccgtgaacggatcaccggtctacgtgcacggtggcccgttcgccaacgtgtccatcggcattccgacgctggtctccgtggaaatggcctgcgccctgcatgacgtggtcatcgtcgaggccggttacggcaccgacgccggcgcccagaagtggctggacatcgcctgccgcgaatacggcgcgcagtggccgtccgccgccatcgtggtgacccgtgcctccacctggcgcgacgatcccgagctggcctggcgctacccgttccacgtgcagcgcctggagaacctggacattccgaccttcccgctcatcaacctgtgggaaggcgaggacgatcaggttccgtccctgaaggccaccgccgacgagctgggcttccgcacgccgatcatcggcaacctgttccgcgacggcggcgaggcgctggccccgcagcttgacggtttcgtcgacgcgttgcagaacggctccatgccggccgaaccgcactcgcacaagggcatggccctgaccgagaacgccaagtgggtggccgagaacgcctacggcgtaccggccgagcgcgtgatttacaagccgggcttcaccgagtccgtgtccgaggccatggaactgtgccagagcgcaggcatctcgctggacgatctggcgttcgtggcggtcaagtccccggcgaccatgaccgacaacgaccgtgcccccgaagaagagcgcaccgtgaccctgaagaaggtcgaggtgcatgccggtgccggtctggtccacgtcaacctgaccaccagcctcaccacccccatgcccaagatcgtgtgatgacaggcacaaggtgaggtaactcgctttcgaggggggaatggtggcaactagaagttgccgccgttccagccccagtcggtggtggcggtgtaacggatgtaggtgcggtcctcgggaatgccgagcgtggagttcagcgcggccataatgctctcggtcagcttttcccaagcagagcccggcacggagcggccgaacacgttgacctccacataggcggcgggctggtcatcgctaccgccgaagtaaatcggcatattgtcttcgaacgggcacattagccagccctcggacttgcccggcacggcggtaatcgccttgccataggcagccttcaacgcctcgcgctgctcaggggtggtgggcacggacacatgagtgtgaataacgggcataattcctccttgattcggttcgcttccagtctagcctcagcggttgctgttgaacatggcatgcggatgtaggaagctgcttgcagaacggaccggggcaaggccaatttggggagattattggcctttccagccaatatatgttccgcagtcagcccaatagtgttgaatacccttgtgagaaaactgattgaacaactgatgaagttcggcattgtgggcgtcatcgcctttgttatcgactggggtattctcaacctattggttggcatattccacatgcacaacgtgctggctgccaccgtctctttcatcatctcgctgattttcaactatctggcgagcatgaaattcgtattcaagcatcgtgatgacatggcgcgctggatggagattcttatcttcgtggcgggcgctgtagtcggtctgttcatgaatgacgcgattatctggatttccacttatggcatgaaccatgatgcctatgtatcgcagcatgccgaatatctgttgcgcaccaatatcggcaagttggtggccactgccgtggtaatgatctggaacttcttgattcgcaagtggctgctcgacgatacgcacaccaatgcgatgaaccgtctgaagtccgctgaaaatcgactgaatgccgaggagcttgaagccaagtggcagaacagcttctcccacaagctcggcatctggtccctggaacacacgcccaaaggctggccgaagtagcgttttgacgtataagccccctcgtcagagggggcttagcttttgtctcacacactcacttcagtcaaggtcggctgctcggtggagcccttgatctgcttgaagccaatcagcgcaatcaccagcgagaccagtgccaaagtggtcaccaccatgaagccgccatgcgagcccatgcggtcgatgaactggccggcaatcgccgaaccggcggaggagccgatagaattcatcgcacccatccacgccatgccttcggtcaggcgggaaggcggcaccaagtgcagcatgagctggttgccgttaatccacgtcggagcctggcacacgccgatgatcaggtagatgatcataatcacccacagatgcttggcgaacaggaacgtgctgatgccgatgttcaccacggccaggcagaagtagaagcgcttccacagggcaatcgaccagttcttcgcgccgtacaccaaggcgcccatcaacgagctgatggagaagcaggcgaatacaaagcccgtgtactgcttcatattcgactcggtggcgaatgcgatgatcgagatgcctgtagccgactggaacgcgcccaagccgaaccaggtgacgcataccgcaatcagacccggtccccagatggacgccttcttgccggaacgcgcatcggcgaccgcctgctcaatggcggcgttaatcgtggcctcatcggtcacgccttcgcgctcaagacggcggcgagtctcctcggctgcggtctccaccttcaacgcttcggctcgagccgcctcgcgctcacggtattccttgcgggaaatgccctcagcgcgggccagctgagtctgtgacggtggctcagtggtcagctcggtcaagaacatcagcgcgcccaccaccacgcacatgccggtgaacgagaatgccagcagaccggagatcacggccagtgtggaagccagtggattgccgattacccacatgcattcgtccagcacgccgcacagggagagcgcacggttggtacgctcctgatcgcccttcaggattttggtccagcgcgcgcggctcatcgcgccccacggcggaatagctgccaggaacggcgtcaaacagtacagcacccattccggcgcacgattggtgatggatgtggtcagcgcgacggcggcgacaatccacaccagaatcgttggaatcgaaacctgccgctggccgaacttgtcggtcagcttgccgagcagcggcgtggccacggccagtgcaatcgcctgaatggcggtgagcatacctgccagcgagtagttgccgtagtaatgctgcacggaaatggtgatggtcatgcccaccatcgggaacggcatgcaggcaatcaccgaaccgatggaataacgagcggtatgaggtatgcgcagcaactccgcatacccaccaaaaactttgtgacccacttccttgatgccagccataatggtgttcgagttggacgagttattggacataacagcactacgctcctttccgctcccgattggatgtcccccgctggtgtggcattgccggcgaagccctcatcgaatgatgtgttgtccatggtcgcgcaaagtttgcgtcggattttcccccatccgcatatttgcgtcatggatactctacgggtgtccactccgcgacacgcggtagattggagatattaagacaacgttctcatgcccttcagggcgggaagcagaaaggcgactcatgagcgctactaccatccatttcgtccggcatggcaaggtatataaccccgaccatctgctctatgagcgactgcccgacttccatctttccgaccttggccgtcgcatggctcaagccaccgccacgtacttggccaagaatccccaaaccaatacgattgcagccgtctactcctcgccgctcgaccgtacgcgcgagaccgccggcgcgattctcgatgcgctgaaccccgtgcgcgaggctcgtggcgaggctccgctcacgctcactactgatgaacgggtgattgaggccggcaacgagttccgtggcaagcgcatcggccatggcgagggcgcgctgtggaagaacggcaactggaagctcgtcaccaacctgtacaagccgagctggggcgagtcctatcagcacatcgcggcgcgtatggacgacttcgcccgcgagaaggtggcccagcaccccggcgagcagattgtggtggtcagccacgaatcgccgattttcagttatcgccattatctggagaccggccaccccgagcactggatgttcctgcggcacacggcgctcgcctccgtgacctcggtgacgtacgacaacgaaaccggccgtgtgatgtcaatcacgtatgtcgacccagcggccaacgtcaagtaacggcacactggtgttaggacattggttcccctctctgaggctgagccgtgaagcaaacagtccagtggactgtttgtaggcgaagacgagccgataggcgagctattgaggcgcgggcgtggcccgtccgcaattgctgctgagctgtcaccgtaggtgactgaggggagccaagagacgcactacaatcgagtggtggacgcaaaggagcatagatgaccattgaactcaatcgtgaggcaatcgcacaggtcacggcattgccggcggtaactgaggccgccgaagccggctcggcgctgatcagcctgtggccgctgaccgaagccatgcagatggacaatgacgcaaagtacgcggagaacctgcaggtgcgcgtcacccgtgcattcgcccgcatcctgaccggcgaggacgtcaccgtgccggacgccgagttcgtctacgaaggtgccgatgagattcccggtcgcccgcagagcatcgtggacgccctgctcgccgccaatgacgcctacgatacgatggccgggtattgcacatccggtgatgcgcggctggtcttcgacgccgccgcgacgctgggcgtccattggagcgactccgtcgcgcacgccgtccgcgccacgatagccgacgtggagtcgcagatcgaagccgacgccgttcagggccgcctggccgcgtccggcgagcctgaggacgtcgccgaccgtttcgccaccgcactcgccgtatgcgatgcgttgttgggtgtggtggccgaagacgccggcgccgacgcccgggctcgggcgaccgccgtgctgccgatcctgctgtacgtcaatgagttgcgcgaacagtgctcgattccgcgcatctgcctgaccgatcggcagatttcagggcttctcgatgcccgtgccgggtccggggacgacgggaccctggccgccaccgccgcgtacatcgcccctttggcccgcgacgaatgggccaagcatcgtgacgatgtgctttgggatccgggtgaggccaagaggagggccaaggaggaggacgagaagcgcaacaaggaggctttggccgccaagttcgcccacatcaaggacgatccgggcaaggaggccgtggagctgtagccggtgccgggcgtcgcgggcggcgtcgcgcgccgtcgtcttgcgattgttttgccatcgttttcgccgcggcggtatcctatggggtgaacagtatcgtccgtgcaatggaagtggaagatttatggacaacgatgtcaatctgcgcacgcttgtcaacgatggcggcagcgcggtaatcagcgattacggggcgcatctgctgcgctgggccccgacaggacagccggatgtggtatggacgccgagcacgtggcgcatcgaacctggcaagccgctcggcggcggggttccgatctgctttccgtggttcgggcccggattcgcgcatggccggcagctggcgatcacgccatcccacggattcgcaagggtgcgccggtggacgctggatgaggaggggttcaccgatgaccgggtgcggtatgtgatggattccgagtgtctgacggatggcgaagtgccgtggcttgacgacgagccagaggcgcgcttccgcgccacatacgacgtgcatgccgctgacacgctgacgatgagcctgaccgtcgtcaataccggtgatgttccgatgtcgtatgaggccgcgctgcattcctatctgcatgtgggagacgtatccgacgccggtctggtgggtctgcggggggcgacgtatctggacgccaccgagaccggtttcccgccgcgattgcaggagccggaggcggtgacgttcggcgaacggccggtggatcgcgtgtattattcggattcgtccgtgcagttgcgcgacgccgttctgggccgcgtggtgcatatcgtcaaatccggctcgccgcagaccgtggtatggaacccgggcaaggaaggggaccatatgcgttgcgccagaccgggcgaatggcgtggtttcgtggcggtggaggcggcggcatgccgcgaccgcggtgtgacgttggcgccgggggagtcgcatacgctttcccagacgttgtcggtggagacgcttgacgtgtgatgatgcacggcggcgcggcatgcggccgacgatgacggtgaggccccgttcgtctcgagcgggcctcaccgttgatgcacgtcgcttcagcgggtttcgccggagtccgggccggcgttctcgtgttcgggcggcacttggccgtattgcggggccggtgcgtattgtggagtctgcccgtattgtgggttctgcccatacgtggggacggtctggccgaagtcttgggcgggggtgccgggagccgggaatcccggggcggcggaggcaccgtacggcataccgtaggcgttttggggtgcggcgccgatcgccgcgtcgtcgtcgaaccgtgcgccttccggcttggagggcagggccatgaacacaatgccggtgaccgcgctggccagcatgatcaatccgccgatggccaacgcgccgaagccgccggttgccagagcctcatagccgtagccataaccgtaatcgtagttgtggccgatggcgccgatggcgccgtacaacgccgcgccgccgccgacgatcatgatgagcagtcccagagtcatcatgccgcagaagacggcgacccaccagccgggcttgttcgtatcgtgcaggcggcggacggcgagcgccaggccggggacgacgatggccaggttccacaggctggtgaggaagtccagcctgccgtccgtgacgtcgccgagcagggacagcagggcgttgatgatgacggcggccagcgtccaccaccagaattcactgcgggaggcgcgtcccctgaacaccgtgtatttctgccagaagcggaggaaggcttcggagaaggggcatccgtagtacggcttgttcagcggcaccgcgccggtgggggccgcgtactggttgtaggtggggggaacctggccgtaggcgggggacggctgggcatagggattggcgttcggagcggactggccgtaggactggccatactcctgctggccatagttgggttggccgtagatgggctggccgtagggttgctgctgcgccgctgacgccggggcggcgaaacgaccatgatcctgccccgcaggcgccgcggtgggggctccatattcgggcgtgcctgagtggtgttggatggggtcgccgttgggcgtgggcgtgggtggtgcgggcacgttgctgggatcggtcattgattcccctttcataagacgattgcgtccctccattctctcattgagcgggcgcggcgttcaacatccacgccgaatggtgttccgtcggcgctcttcatcattcccatgctgcaacttggccgcttgcccatccaaacgatgctgcgatgcggaacaggaaacgattgcgatcagcggaatggtgggttctcgtggtggttgcaacatctgatctaccgcaaggagtatcaggtgttgcaacgttcactagaactcgccaccccgtcgcttcgtacctaaggatagccgttccctcacattccgacgaagcgatcgaagtattggcggaaccgttcgacgactcggctcttcatcagctcgtacgcgttgctcggcgcgaagcgtgacacagggggcagcatcgacactattctggtgccgtccgtgtcgacatagccttccttgaagcagtcgatgatgaactgctcggccagtcccgtcttcaggtgctcctcgctgacaatgcgctcgaattcctcctgcttcttgcggacgatgtattccttccagtcgcgctgcacgtccgcgcctgaggacagggactcgacgaacgagtcgatgaggtcctttttgctgcgcaggtcgggcgaagacatgatggtgcggctgatgtccgcgaggatcgacttgtcctccatatgcccgtcatggtatttggctacgagttcgaggatgtagtcgatgttcacttcgatctgtttgaccagttcggcttcgaagacgacgtcgtcgttgatgatctccttgtcggcttcctcatgcgaacgccgctgttggtagagatcgatgtacaggctctggtagtcctgcaggtcgcgcaggctcagcacatcttcgttggagaaatcgtcgaaggcctgcaggatgttgcgcagccgcaggatcgagccgaacagggtgaggaaatccttctgcgcctgttctccgacgatttcctcgcccaaggggaaccgcttaagcagctgcgagaccttctcggtgtatgcagcgagatattccgcatatggtttaagcaccaccgtgcccttggcgtccttgtccccgaacagagccaaggcgtcatccacctcctgccgcagatcgcggaagcagacgatgttgccaaaggtcttcaccgagttcaggatacggttggtgcggctgaacgcctgcatcaggccatgctgcttcaggttcttgtccacccacagggtgttgagcgtcgtggcgtcgaagccggtgagcaacatgttcaccacgatggccatgtccagatcgcggttcttgagcctgaggcacaaatccttgtagtagttctcgaactggtcggaggccgtgctgaagctgctgccgaacattcggttgtaatcgcagatcgcggcatcgaggaaatcccgtgatgactggtcaaggccagcggtctcgaagtcttcgtcatcaatgaagccctgctcgccggggtcggcctcgttcggcgcgaaactgtagatcaaggcgattttcagcggttccccgccgcgctcggcctgctggcgctggaactcggcgtaatactgcttggccatgccgatggaatcagccgcgaacagcgaattgaagccgcggacgcgccggtccttgagtatgtagctggattgccgcttggttttctggtcgaaatggtcgagcacatacgacgtgaccgcgctcacgcgccgcgggtcgctcagcgccttggccgcgtcgatgccgtacacctgttcgtccctgatgccttccttacggcgcaccgtgtccacgtatccgatacggaacggcagcacgttgccgtccttgatcgcgtccaccaccgtgtatgagtgcaggcagtcgccgaacgcctgtccggtggtgcgcagattgggggagcctccggttttcgcgttcacggcgaagatgggcgtgccggtgaatccgaacagatgatagttcttgaaatgcttggtgatggcggtatgcatctctccgaactggctgcgatggcattcgtcgaaaatcagcaccacatgctgcgcgtagacatcgtgcttgggattgctgcggatgaatgaggaaagcttctgaatcgtggtgacgatgattttcgcgtcggggctggcaagctgctcggcaagcaccttggtgcttttgttggagttgaccgcgccctttttgaaacgttcgtattccttgatggtctggtagtcgaggtccttgcggtccacgacgaacagcaccttgtctacgccatccatgttgctggcgagctgcgccgtcttgaaactggtcagcgtcttgccgctgcctgtggtatgccacacgtatccgcccgcctcgggcgtgccgagtctcttcggatcgtattcgctgatgagaatgcggttgaggatgcgttcggtggccgcgatctggtatgggcgcatcaccagcaggtcatgctcggcggtgaacacgcaatatcgtgtcaggatattgagcagtgtatgccgggcgaggaaggtcctggcgaaacccgtcaggtcggcgatgacatggttgcgcccgtcggcccaccagctggtgaactcgaaactgtcggagctcttctgtgaacggccggctgcgggacggccttccatttcatggatgtgcttgaagcgcgtggtgttgctgtagtacttggtgtgcgtgccgttcgagatgatgaagatctgggcgtactcatagagtcccgatccggcccagaagctgtcacgctggtaacggttgatctggttgaacgcctccttgatcgccacgccccgccgcttcaattcgatctgcaccaacggcaggccattgaccagaatcgtcacatcataccgggtcgggtggctgccgccctcctcctcgaactggtgaagcacctggagacggttgctgtgaacatgcaccttgtcgatgagacgaatgttcttcgtcgtgccatcgtcacggttcagaatctggatgttgtcttcctggatcagccgggtcttgtcctcgatgcccgccgtcgaagaggcgatgaccccatggaagaaatgcgaccactcattgtcggtgaaccggacatcgttcagcttctcaagctgggtgcgcaggtttgcgataagctcggactccgtatgcgcggaaagtcgttcatagccctgggattcaaggattcgcagcagctcctcctccagatccgcttcgctctggtacgcggtctcacggccgtggtcaggctcgtattcggccaccacggtgctttccgcgccctcagccacgagcttgtacgacttgccgccatccggcagatccatatccgaccgctccgtcatcatgggctccttcttcatccgtatttatccgccatcctactcaaaggaattcggattccacagcgcatatgggattcctgaatcctgcagctcattcccaatgcagggccgtcctgattccagaggcgtatgtctcattcgagtcgaggaagcgacgaatcaccatggcgtagccatcgtcgccctcgatattccgcacaagatacatgagcgcaaacagcgatgacgccacggacttctcgccgtattcgaaatcggcgaacgccgttttcatgtcacgcgtcataggcgacgggatgaccatctcccgatgccacaatctggcatgatgcgagcacagattacgcagataaaccatggcgtgcacgacctccgaggaagtccgcagattggtgcgcaatccgaccgatctgtacaattccctgagcgccttggcatccacgtgcagggaaagcatccgggaaagcgtatcgaacgggaacgtctcgacggccgcccacacaggcaccggtccgcctttgcgccggtaatgccgcatgcatacctcgttggacatcttcatccatttgtccatgttgcgcagcagattgtcacgcaacagttcgccgcgtttgctgcgcacatcctgataggattcgggatccatatacgtgtaggcgttgccgtctgacgccagcaggtatgcgattctcgaacgcagggtgagttccactttcgcggtgcctttgaggatgatgttgcgcagcttctcgtccatcgcatagggaacaaggaaatcaacgtcccgagtgcccggcctgtacctgttgtcgccggccgctgggttgacttgaaaggaacggaagtatcccgagagacggtaatagttgcagtcgaagagcacctgccgcagctctgcttcatccgtgatcaccaggcctcgctccgacatcagggcgatcatctggtcgatggtcttcgcgggcttggattccgccccgatatgagaagagccccctggtttgagcactgtgagtaggcttagggagctgctgttatctgccatgttagtcgtgtcctcacgttttgaaaagtctgcggcgcgtcccaaccatgctatgcatccctatggtccggcacctgaccatacatcaactcgaccgttcccacgatgaaacgtcacacggcaagttcgtcgaatgacagcagacggtcccggtaatattcgtactgcttgcgccgggcctcgatctcggcgggcaggccggaacttaggtcattggtgagcttgtcaaaacgatccaggatggagacaattcggcgttgctcttcaagcggcggcaaactaatgggatacgacttcaccttcttagcattaatattcgattgtgagccctcacccaatgcctttagatgttcatactcattggaaagccagtggaacacatatcggacatcagctttggtctcgtcaatctgcaagttacaacatgcttgattggttgttaggggaatgctgttcactgctacctttgctgccgttgccccatacattgccacaatcacacaattggccggtatccactgggcagccgaatttctcaatccttcatctgaaatggtggctgaagtttgattaataacattgaaatcaatatcctgagtcctcaaccatgggacattcccatcatagtaatcatgacgctttgatgatggcgttccgcctgaacagattcggacgcagatatcctgaatacaaacggttacgactctctcgaatgtgaggagttcattgcgataataggcatactgcttcctccgcgcctccagctccgcctccagctccgcctccagctccgcctccagcgagctgaacgaatccagaatccgaacgatctcctcctgcaccggcaatggaggaacgggaacatggattttggccattgcatcgccatttacacgtagcacttttgtaccagttatatatttctttttctgtgactggaacagctccgattggaagcaataagatatatattttggattttgatgatgccggaaaatataggcgtcaccgctaatagcaatcggctcttcgcctagccatgcgcatgccttacaaacatcttcttcgttttcacttgtcgtagctataaccagatcgcctttatatgctttctttcgtttttcagccaagtttgggtcaatgaacgacttcgtatgatcggcaaataagccataataggtataaatctgtccataatggatgcacccgaatccagaatcttgaaaatccctcttctgaatgccattacctcgaataaactcacctatttcgcccaacgtttggtgtttcaccccatcaggacaatattccgcgatcaaatcgtcaatcctgctcatgttcatgctcccgatactggctgaaggatagttccatgtactgtttcctcattctgtattccgaggactctgggtacgttaagtccttgcctatacgcgcaataggactgaaatagcatccgtatgcttccagcactggcgaatagtcagatgacacggcgcaagcaacagaatttcggttccttccgccattcagcgataatcggacttcgcgaagtgctaacttattgaatcctttttcataaaaaaggtaattctccccaccggcgcgggcatgggacttatagacaagacaatcaggatcctgggccttgatcatcctaagcaattccaattcagctttgtttagcggcgcagcgttatcgaccttgtcgattatcgcttgtatctcgagattacgagcatccacaagaaccaatggttcttgatccatcaaggtaggccatgtgctggtcgcatcatcgtacgctttgaacagaatcacatcagacgaagcgccgtgttttctaatttcagcttttgctgtttccgcactgctcgaccaataagacaagcgctgattgccgaatacgctactatagcgcccaccggaaggcaatctcagattccccgcatgcaattcgctaactgttttcccgtacatcgagtgactgaattcaacgcagcgatagaagtcgaactcttgactgcatgccacagggatttcgggaagatactgtgtcctaccaaaatagccctgtgcctgaaacgcttcaaccacttcagctctccaaatccgcgatgatggcgtcgatctgggtgcggagttcgttctctcgtgccacgatgtcggagatctgccggttgagtgcggcgatgtcgatcttctctctcgtgtctttgggctgcacatagccgctgaccgacaacacgtaatcgttcttgcggatatcctcaagagaggcaacggcggagaaatgctcaaccggttcacgtttcacataggcatccatgatggcggcgatgtcgtcgggtgaaagctggttctggttaccgacgtgcacgaaccgttccgacgcatcgatgaacagcacactgtcatcggttttcgattttttgagcacgataatgcaggtggcgatgggggtgccgaagaacaggttcggcggcagctgaatcaccgcgtcgatgaagttgccctccagcagatatttgcggatcttctgctccttgccaccgcgatagagcacgccgggaaactcgacgatggccgcggtgccgtcggccgccagccaggagagcatgtgcatggtgaacgccagatcggccttcgacttcggcgcaagcacgccagccggagaaaatcgtggatcgttgatgagcgtggggttgtcatcaccctcccacttggtggagtagggcgggttggacacgatcacctcgaacggttcgtcgtcccagtgctggggattgatcagcgtgtcaccgtaggcaatgttgaaatggtcgtagttcacatcgtgcaggaacatgttgatgcggcacaggttgtacgtggtcaggttcttctcctggccgaaaaacccttgccggactttatccttgcccagcaccttgatagattgcagcagcagggaaccagaaccgcacgccgggtcgtagaccttgttcacttcgctcttgccgtgggtggcgatgcgggtcagcagctcgctgacctcctgcggtgtgaagaactcgccaccggacttgccggcgttcgccgcgtacatggtcatcaaatactcatacgcgtcaccgaacgcatcaattgtgttgtccgcaaagctctccgtgcccaagtccagattaccgatggcgttgagcaccttcaccaatttagcgttacgttccaccacggtatcgccgagcttgcggctgttcaggtccaaatcgtcgaacagaccgcgcagactggattccgagcgggagccgatggctgaaccctcgatattcttgaacacccgctgcagcgtctcgttcaggttctcgtccgcatcggcacatctgcgcacgttggcgaacaaatcggacgggaggatgaaatagcccttttcctccaccatcgacttacgcacctgctcggccgtggcatcgtccagcttggcgtagtcgaaatccacatcgccggcctggtgctcgtacccgttgaggtaagaggtgatgtcttcggagatgaacctgtagaacaggaaccccaacacatactgcttgaagtcccaaccgtccaccgagccacgcagcacattggcgatattccaaatcgccttatgcaattccgcgcgctgcgcgccgctattcgtcatgtcatgccttctttaaaatcgtaaagtataacccccaacgataccaagtgtgcaggttcacacaccggtcgcgttgtctcaatgaaagcgcgacgactccgccgggttgcgatactggcggttcgccacggaacaccgtcgcgtccggcgcgcgcggcacaataggggattatgactgatgctgaaaacaccaaacccgaactgcccaagaacgttcgtgttcgcttctgcccgtcgccgaccggaaccccgcatgtcggcatgattcgtaccgccctgttcaactgggcggaagctcgcgccaccggcggcacgctgatcttccgtatcgaagacaccgacgccgtgcgcgactccgaagaaagctacaaccagatcctcgaatccctgcgttggctgggtatcgactgggacgagggcatcgatgtgggtggccctcacggcccgtaccgccagtccgagcgtaccgccatctacaaggatgttgccgccaagctgctcgaagccggctacgcctacgagtccttctccactcctgaggaaatcaaggagcgcaaccttgccgccggccgtccggccgagttcggctacgatggctacgaccgcaacctgaccgatgaacagaaggccgccttccgcgccgagggccgcaagcctgcgctacgtatcaagatgcctgatgaagacatcgcctttgacgatctgattcgtggcaccatcgagttcaaggccggctccgtgccggactacgtgatcgtgcgcccgaacggcgacccactgtacacgctgaccaacccggtcgacgacgcgatgatggaagtcaacgtcgtgctgcgcggcgaggacctcctgagctccaccccgcgccagatcgtgctttaccgttaccttatggaactcggcatcgccaaggagatgccgctgttcggccacatgccgtacgtgatgggccagggcaacaagaagctctccaagcgcgacccagagtccaacctgttcaaccaccgcgacaatggcttcatccgcgagggcctgctcaactacctggccctgctcggctggtccattgcaccggaccgcgacgtgttctccatggacgagatgaccgagaagttcgacgtgcgcgacgtcaaggccaacccggcccgcttcgacatcgacaaggccatctccatcaacgccgagcacatccgtatgcttgagcccgaggacttcctgcgccgctcggtgccgtacctgcaccgcgacggtgtggtttccgccgacaactgggatgccctgaccgaccgtgagcgtgaggtgctgaccgccgccgctccgctggttcagccgcgcgtgcgcctgctgggtgaggttgccggcatggtcggctccctgctctccaccgagggctacttggagccggctgacgacgccaagaagcagctgaaggattctgccggcgaggtgctggacaaggccatcgccgcactcgaggctgtggatgaggctgactggaagaccgacaacctgcatgagaccctgaacaaggctctggttgaggagggcggctacaagccgcgcctcgctttcggtccggtgcgtgtggccatgtctggtcgtcgcgtgagcccgccgctgttcgagtccatggagatcgtcggcaagccggtttccctcgctcgcctgaagggcctgcgcgagcacctgtgagctaaggttccttccgtgctcggctgagctgtaaggacactcaaggtgggcgtctgcatgtgcagatgcccaccttttcttgtattcagtgatgagctggaacagctggaaagtcttaccgctgcgccgcatgccagtgagaatatgtacgaggttgaacatggctggtttgtgcagtgaggtcacgaaacgtgccttgtaggtggtttcgccttcatgcgtccatgaaacggttgataggtaaccgggcggcggtctttgacgtgacattgcattacaagcatcgcgacgcgctcgctgtcgcaagggaacataagcgcctcatttggttcttgaaggctgatttgccggctatgaatgtgcaaggcaaagatcattgcctcatctgcaatttcatcagtgcattagatggtaattcatcagtagtgcttactgataatccgtcagtagagttcatgcaaattcatcagtagtggcagcgtagcacttgaaatcgttgaaattccgcgcgacacgccgtaagttgcgtaagggtgaatacttgcgtatatttatcactcgttgcgcggttcaccgagcagccggttgaaaaactgaatatgcccccatcgtctagcggtctaggactacgccctctcacggcgccaacaccggttcaaatccggttgggggtacgacgaacaactccttggagttgctacgccaagccaaattgggatgtggtgtaattggcaacacagctgattctggttcagccattcttggttcgagtccaggcatcccagccaatgaccctcgcggaatgcgagggttttttgttttcagggaagtagccgcttgaaaagcgacttccctgcatatgagtgcgcataagagcgctaagagcgcatacgtgtgtatgaaagtacgagaacgaaggagatcgaagtatgtccgctgggcagcaggctgtaccggcaaacaacgccaacaatgcaagcaatgaaggcgctcagaagaagcacatgtctaaggcggccgtcgccattatcgccgtggtggtcgtggccattatcgtcgtggccggtgtgttcggcttccgcgcctactccgatgctcagtacaacaatgcagtcgccgcttgcgccgccgcttccgaaaatgtgcgcaacgccactaatgactacaacaacttggtcaatggcgatgcttccgaagctgctgcgctcaccaagaaggatgtaaaggatgcctccacgctggacgccctcaacaaggaactgagcgtggaactgccggtatacgaaggctgcgtagctgacgacactgccggcttcaagtccgctactgcgaagctcaacgagcaggctgattggtacaaggcttatactcaatcgctgcagaaggctgtggatgccgtgaacgcttccaagaagtaagcgagcacagcctcaccattgtcgtcaaagccgtcttgcggttgcgcaaggcggcttttgctattttgctcaatcggcttgctgctgtaatgctgctgcattgattgcgtcgaatgcaggtaaattcgtcttactttttttgcgcagtttttccctgcgcgtgtcgcgatgaggtagtgcccgaaggtttgcgcacttagggtcgtgcccgtccatgggacgatgatcagttcgcttcctgcaggttgtcatcgagccgggacatgtcgaggtagcggcgcgtgctccattcgttcgcggtgacgtacctgattctggcgcagatgagcatcaacgcgctgttgccgtccgggaaactgccgacgacgcgcgtgcgacgccggatctcccggttcagccgttcgatcatgttgttcgtgcggatcctcctgcggtgctccgtcgggaattccggcaaaaggtaggcggtcgtctccccgatgccctcgcgcaggcagccggccgccgccttgagcttcctggactccatctccgcggcgaccgtcccggccttggcgagggcggattcgcgggactccatggcgaatatcgccttcagggccgcggacgcccaatcccggtggttgggcggcaccttcgagagcacgttgcgcatgaagtgcaccatgcaccgctggtacttcgcccggggaagcatcgagttcaccgtggagacgagtcccgcgcaccggtcgccgaccacgaggcgcacgcccttcaaaccgcgttcgatcatgcttcgtatgaactgctcccagctggcagcgtcctccctcatgccctccgtcacgccgatgacctcgcggtggccctccgcgttgacgccgatggcgacgaggacgctgacgttctccacgcttccgccccaggagcgcttgtgccacacgccgtccatgaacacgtacgggtattcggattccaatggccgggtgcgccatcggtcgatgtcgtcatacacgcgcttgagcttgtcggaaagggtctgggatggcatcctgtcaccccacagcagtttgctgatgtcgtcgacctgacgggtgctcactcccgccaggtacatctccatcaacgcctcctcgacgctggactcccgcctgcggtagcgttcgatgaccgcggattcgaagaccgcgcccttgagtttcggcaccctgagctcgagcctgcccgcctttgccgtgagcgtgcgttcgtagtggccggccctgtacgccttgcgcccctccttgcgttcgtatctggcggccccggtgatctcgtcggcctcggcgtcgagcatggcgttgaggatctgggtcatcttctcggtgaccagccggtcgagtttggtctcgaacaggttctggtcgatctgtatgatgttgctgtcgggcatggctgcgcgtcctgctttccaattgcgattctttgtttggcgactgaaaatcgtacacaggacgcgggccatgcccgcttcaacatctcaacgaagaacaaaaccgaaagtgcgcaggaattcggacgttatccgcgatgatgcgaatatagatgtgaaggttaacaacgtagtcgtttattgggttttgtgatttcactcacgttgtaattcaatgtcaaatatgtggcgattctccgtatttgctgagattgctattaagaatagcttcttgtaaagtgtcttatcgtaattgcgaatgcgtattcttcaatgaagaaggcatctgcttcacctcgaagaagagattaaggaaaatatagttaatgaaaaagaagaagactatatcggctgcgctggcaacagcgttagccttaacctgcatgggcagcgggggaggtactgcgttcgcagtgcccctgtctgatgctgacttgcagactttggcaagtcagattcagcaaatcaacgatacttctgattctgcaactgcttccgagactccttccgcacaagccgatgcggttgaaggctggactattgattccaacatcgctcagggcggcgaaatcctggagatggcaaacggttggctgcacctcaagtccactgcctctaacggtaatgcggcagcgaaccccagctccagcaacaactggccggcagtagccgtatggggcacagattacgacttctccaaggccggctccttccacgccaccatcaaatccccgcaggaaggctccgccaaccgcttcggcttctacctgggctacaacgacccgggcagcggcctgttcatcggctacgattcggacggctggttctggcagacctacaccggtggcggtagcggcagctggtacagcggtgctcgtatcgctgctccgagcgccaacgaagagcacgacattcaggtctcctggaccgacgccaaggtcgccacactgaccgtggatggccagaaggcattcgatgtcgattactccgcaatgacgaacctctccaacaagcttgccatcaaggccggctcctggaaggggctgaaccaggtcaccgacgtgtacatcaaggacttcccggaggttgtcgaagccgccaagcacgcggtttccggcaaggttgtggacgctggaggcgctgccattgaaggcgcaacagtgcgtttggataagaccaaggtgaagaccggtgcagatggcaccttctccttcgccgacattgaagaaggcgaacacacgctttcgattgccaaggaaggctatgaggacgtctcccagccggtgacggtctccggcgcggatcttgccatcgatcccatcaccctgaacaaaaccgttcaggtcgcctccgaaacgctgaagaccaagaagatggaagttcagattaagaagaacttcccctctgtgctgcagtacacgatgaccgacggcaaggtgatgtacggccagtccaaggatgtgcgcaccgttgaaatcaacggcaccaacatcgaactgggcgatgacgacgtgaccttcaagaaggtttccgacaccgaggccacctacacgctgaaggtcaaggatgaggccaagaagattgacgcggtgatcaccgttcagatcacggtcaaggccaaccagctgcacctcaacgtcaccaagatcaagaacaacctgtccgaaggcattcctgagggcaacggtgtggaggagaacgccatccagacgctgtccttccccgaacagagtctcgtttccgtgcgttccagccaggaaaatgcccaattcactggtgctcgtatgtcttccaacacgcagaagcctggcgataccaacttcgcagtgaccgaagatactaacgtcaccgatagcgactacacctacggcttcatctccggtgctggcctgagtgccggcctgtggagcaactccgagcacgatggcacctatgtggcggctcctgtgcgcggcggcagccagaacacgcgtgtctacgccaccacccagcagactggtgacgccacctccctgggcctggccagcgctccgtggtactaccaccgcacggtcaccgattccaagggcaagaagtacaccgtggccgaaaccgctctgccgcagatggccgtggccatcgccggcgacgagaacgaagacggtgccgtcaactggcaggatggcgcaatcgcctaccgcgacatcatgaacaacccgtacaagtccgaggaagttcccgaactggtggcatggcgtatcgccatgaacttcggctcccaggcgcagaacccgttcctcaccacgcttgacaacgtcaagaaggtggccttgaacaccgacggcctcggccagtccgtgctgctcaagggctacggcaatgaaggccacgactccggccacccggactacggcgatatcggccagcgtctcggcggcgccgacgacatgaacaccatgatggaagagggctccaagtatggcgctcgcttcggtgtgcacgtcaacgcctccgaaatgtatccggaagccaaggccttcagcgaggacatggtgcgccgcaactctgcaggcggcctgagctacggctggaactggcttgatcagggtgtcggcatcgacggcatctacgatctggcatccggttctcgtgtaagccgtttcgctgacctcagcaaggaagtcggcgacaacatggacttcatctacctcgatgtgtggggcaacctgacttcttccggttcggaagattcttgggaaacccgcaagatgagcaagatgatcaacgacaacggctggcgtatgaccaccgaatggggttccggcaacgagtacgactccaccttccagcactgggcagctgatctgacctacggcggctacacctccaagggcgagaactccgaagtgatgcgcttcctgcgcaaccaccagaaggacagctgggttggcgactacccgcaatacggcggcgctgccaacgccccgctgctcggcggctacaacatgaaggacttcgaaggctggcagggccgcaacgactatgccgcctacatcaagaacctgtacacccatgatgtgtccactaagttcatccagcacttcaaggtgacccgctgggtcaacaacccgctgctgaccgccgacaatggcaatgccgctgccgtgtccgacccgaacacgaacaacggcaacgagcagattaccctgaaggattccaacggcaacgttgtagtagtctcccgtggttccaacgacacctctagcgcagcctaccgccagcgcaccatcaccttcaacggcgtgaaggtcgcatccggtgtggtctccgcaggcgatggcagcgccactggcgacgagtcctacctgctgccgtggatgtgggattccttcaccggcaagctggtcaaggattccgagcagaagctctaccactggaacaccaagggcggcaccaccacctggacgctgccggacagctggaagaacctctccagcgtaaaggtgtaccagctcaccgatcagggcaagaccaacgagcagaccgttgccgtctccggcggcaaggtgacgcttaccgctgatgccgaaaccccgtacgtggtgtacaagggcgaagccaagcagatccaggtcaactggagcgaaggcatgcatgtggtagacgccggcttcaacggcggctccaacaccctcaccgacaactggaccgtcgccggaaccggcaaggccgaagttgaaggcgacaacaacgccatgctgcgcctgaccggcaaggtcgatgtctcccagcgtctgaccgatctcaaggctggccagaagtacgcgctgtatgttggcgtcgacaaccgctccaccggcgatgcatccgtcaccgtaaccagcggcggcaaggtgctggccaccaactccaccggcaagtccatcgccaagaactacatcaaggcatacggccacaacacgaacagcaatacggaaaatggctccagctacttccagaacatgtacgtgttcttcaccgcgcctgagaacggcgatgccacggtaaccctgtctcacaagagcaccgacggagcacacacctacttcgacgatgtgcgcatcgtggagaaccagtactccggcatcacctatgagaaggacggcacgctgaagtccctcaccaacggattcgaaaacaacgcccagggcatctggccgttcgtggtctccggttccgaaggcgttgaggacaaccgcatccacctctccgagctgcatgctccgttcacgcaggccggttgggatgtcaagaagatggacgatgtgctcgatggcacttggtctgtgaaggttaacggcctgacccagaagggcacgctggtctaccagacgatcccgcagaacgtgaagttcgaggcgggtgccaagtacaaggtgagcttcgactaccagtccggttccgatgacatctacgccatcgctgtgggccagggtgaatactctgccggcagcgtgaagctgaccaacctgaagaaggctctgggtgagaccggcaaggccgagttcgagctgaccggtggcgtcaacggcgattcctggttcggtatttactcgaccgcaaccgcacctgatctgcagggttccaccggcaatgcacaggacttcggcggatacaaggacttcgtgctcgacaacctgaagatcgagcgcatcgagtcccagacccgcaccaaggccgaagcgcaggacaaggtcaaggaaatccgcggcaagtacgattccaagcgtgctgagctctccgatgccgcatggcagcagtatcaggacaccttggtcaaggctcgcgtgctcatcaacaagaatggcgcaaccgctgaggacttcaccaaggcatacgacattctcgtggccctcgacgagtacatgaagaccgctcccggcaacgagagcagcgacaagtacgacgtggcagctgacggctccgatgagctgggtggctacaccgtggccacgggcagcgaagagcctaccgcaggcctgccgagcgaaggcccggccggtctggcacaggatggcaacgacagcacccactggcacaccagctggagcgagaacgcagtcggcaacggcaccgcatggtatcagttcaacctcaacaaaccgaccaccatcaacggcctgcgctacctgccgcgttccggaggtatgaacgccaacggcaagatcaagggctacaagatcacgctcactctggcggatggcaccaccaaggatgtcgtcaccgatgctgagttctccaccaccaccatgtggcagaaggccagcttcgacgccgtcgagaatgtgaccgccgtacgcttgaccgtcctgtcttccgcaggccagagcgactcccaggccaacaagttcgcatccgctgccgaactgcgtttgaccacggaccgcgaggttgaggaagagactgtcgctccggacaagaccgacctcaacgacaccatcgccaaggctaacggtcttaaggaatccgactacacggctgaaagctggactgctctggtcaaggcccgcgaagctgcacaggccgtggcggataacgataaggccaccgcttacgatgtggctctggcgctgacgaacctcgaatccgctatcgctggtctcgagaagaccggtgaggagcctggcccaggcccggttgaggtgaacaagaccgacctgcagactgcagtgaacaaggcaagcaagctcgagaaggccgattacacgaccaactcgtgggaagctttcgccgaggcactgaaggctgcacagcaggtgctcgacaacaagaacgccacccagcaggatgtggataccgcactgagcgctcttcaggacgccatctccaagctggaagctaccgccgagccgaagccgaatccggaaccgggcgtggtggacaaggctgctctgaacgcgaccatcaacaaggccgccgccatcaacctgggtctctacaccgacgactccgccaacgctctgcgcgccgcgctgaagaaggcccgtgaggtctccgacaacagcaacgccacgcagaagcaggtcgacgcagctcgcgaggctctcgagaaggcaattgccggcttggtgaagcgtaccgctgccaagggtgatggcaatgtcgtctccaacacgggtgccaatgtcgtcacgattgctgtggccggattgctgctggccggtgccggcgccgcaatcgcctaccgccgcaatcgcgagcagatgtgatcatgaaaccgtaaggttcgcgaccacataaggagcactccttattatctcggccggtgccggtcagcaatgcccagcgccggccgtttttgtatgaatcagtgttttccggtcacccagcgggcatcggaatgcacatgggggatcatcatcacaatgaccgcaatcagacagacgatcatcaccatcaaaataacgtcctcatgaccgcgcgtctgcagcgtggctccagtcaaagcaccgagcgccaaagccagcattacaatcgcgcgccggccaagtttggactgctcatgaccatgcgccgaagtgtcagcgataatcccagttaacgtcatcgtcaacacagtcgtgggcaaatctggcaccgaaagcttacgagcagtggaattctgaatgcccatagccggtgcgagcagcacaatcagcagaataatatgcaaatcaatatgccgagcagttgggaagttcagactgggctgtgccgtgcgggcgatggctgaagcatcagtgccacccatcgacggttcaggcgcaaactgattgagcagataaatgccgacgagcgcagctgccacaaaagccagctggattgacgtggacaccagcagatggcgcgcgcggttggcgccaaagtaatgaataatgcgtccgccgatgaacgcaccaatcatgaacgtggccagcgtgagcgccgaagtccaccagacgaagccctgcgcgtgggcgaatgcaaaaccaaggaacacaatgttgccggtcacattggccacaaatacatgaccgagtgccaagtaacttaacgcatccaccagtccggcgacaaacgtgagaataaccagagctggggaaagcagaccgtaccgatcatccttgcggggaatcagtgtgcgtcctgcttcggcaaggtgtgaggtcatggtgggagaggctttcctttgctgtttggcggtattcaatagctggcgcgcggccttgcacattatgaagtgtgtgccggacggtatatgtcaatgagtctgcgctcgcatgcggagtgcgtgcaacagttcgctatgagttcacctgcgattcgctgaacgcgcatagttcggtaacgcgatttcgctatatctggtcgtaataccgatgaggctaggaaaaggaatgattatgcagtcagataacagccatcatgaagcacatcagaacgacctgaactacagcagtgagtaccagtacgatatgtatatgtatgccgagtacggcatcgagtggtgattgagagccccgagtgagaattggactcacgacctcttccttaccaaggaagtgctctaccactgagctatcggggcgataatgtgcgcacggcttagggccgttgaacggcttgcacaacaatacacgcaatcgcgtattacgcaaatcgacgggtgtacgaggaagtattcgggtgctctaagttgtacacatgagcgcaatattggctattttgcgctcatgtggcattcggatgtgccacgtaatcgcattttcgtgtttttatgcgctgttgtggcacgaaaattgtgggaattcggtcgtctcggaatatgtgccatgccacgccactgcaaaaacagtgaatgtgcacgattgtgcacatatttggaccgctgcgtatatgcatgtgggtgcggataacaaaagggttttgacaaaagccaaaaccctgatggcggaggatacgagattcgaactcgtgaggctgttacaccaacacgctttccaagcgtgcgccatagaccactaggcgaatcctccatgcactgcagtgcttgctagaagtaagctccgtaggcaactcgaataagctaccacagctttcggataaatgcacattcagtgccggctgcggcgtgtcgctttgtggacaaggaccaccaatgagtgcctgcgctgatgtgcaggtcgttcgtacggcgtgtgcaacaggtgatctcaccgggggatgaaccagtgcaaataaaagcgactcaaggcaagtcagcaaacccgaggcaaaccagaatgaacatgcgcatgccatcgcgtgaattattgccagcctcttgccgtgatgcaacatagtgattttaggctatgaaccttggtgaaacagttggtcatgcaatatgagggatggggagtggccaatcgcggggagttcataattcgggaagtctcccatctgtgagcgggacaatatcgaatattgagacaatctgcggtaataattgatcgaaaaacagtgcctaatacctcttaaatcctaaaaaatcaagactgttcctcaaaaaagtttttctttatattgagtagttggtttttgattacttagccgcgcagagagagggataggcatggttcgtcgcgcccaggctgctcttcggtccgttgaacacaccagcgtgaggcagctgcgagttctggctgcgattgtatttctgttcgccatggtcatcgccactgtggctcctgcagtcacggctccgatggccttcgccgacagcagcaccagctcgtccagttcatcaagctcgtccagcgttgactacgccacctgggccgaagtctccaaggcgatggacaagcagctgaacagcggtcttaagacgtacaaggatggcaacaccgctggcgccacctccgatttcatgggcgcgtacaacaagatttacgtggcctccaacttcaccgcggtcgtgcacgacaccattggcgcggacaagcagctcgcccaacagcaggcattccaaagcgttcagaatctttcctacacgcctagcaacgacgatcaactggctcagcagattgatgcgttgaccgccgatcttgacgccacggcccagcagctcgacaccaacgccgatctcgccaagccgaaggcgtacgccgaagcgctgcaggcgcagctggccaaagagcgcaaggagctcgacgccaagaaaaagaagaacccgggcaagggcaatcgttcatggaccgacgtggccaacgaaatgaccccgattctcgacaatgcatacaaagcttacgaaaagggtgatggtgccaagggcgccacgctcgtgaacaacgcgtactaccagtattacgagaagctcggcttcgaaaagaacgtgatgaacgccatcagcggcaaccgcgtctcgcaggtggaataccagttcaagatgtgccgcaagtccatgaacgccggcgcatccctgaaagacaccaagaagctgatcgacgacctcaaggccatgctgatcaaggacgccggcattcttgacggtggtgccgccgataaggaagacggtttcaccaagctggtcaccagctcctccggccaggcgttcctcgtgcttatccgtgagggtcttgaagctctgctggtggttgcagccatcgtcgcctacttggtcaagtccgataacaagcgcttcgtcaagtggatttacttgggtgtgctcgtcggtctgctcggcgccggcttggtggctgtgatcttcgtgttcgccttcggcggctccggcccgattcaggagatcatggaaggcacctgcgcactgatcgccatgggcatgctgctgtggacgagtaactggatgctgaacaagtccagcgtggaagcgtggaaccgttacattcgcaagaagaccgaggctgctgtggctgatgccgaagccgccgcaagtgccgacaacgtgacgttgaaaaccgtggtctcgctggctatgctgagcttcctcgccgtgttccgtgaaggcgctgaaaccgtgatcttctacgagtccatctacacgatgagccgcgatactcgcggtatgtggatcggtggtctgaccgccgcggtggtgcttgtcggcatcttcctgctcttccgcttcacctccgtgaagattccgattggtccgttcttcctggtcacttcgattctgatgtctgtgctggtggtggtgttcgccggcggcggcgtccactcgctgatcgagggcgacttgctgcccgccttctacctgaacggtgtgccgacgaacgattggcttggcctctacccgtacgtcgaatgcctagtggcgcaggccatcgcagccgttgcggttatcgcgctgttcgtggtcggcttcatcaagcagcgcaagctgaaggcgcaggctgctgccgaggtcccggccgtgaaggcgtagcccgtctagctcgtccgtttcctcccataactgcagacaactgacagacttgcggcacggcctcggatcgatgccaattcctccagcccacgccgcacttatctcataactgaataattgcaattatctaagcgtgaatcctaattcaccagagatagagaaaaggaataacaatgatgaagaacaagaaactggccgctctgctcggcctgctgctcgccggttccatgaccgtgtccatggctgcctgcggttccaccaactccgcatccgacactaaggctgactcctcctcccagtcttccgactcctcttcctccgattcttcctccgattccggcgccggtttcgaagaggttccggttggcccgtccggtactgctgaagagcaggatcaggacgccggcccgctgaccgtgggcgctgtgtacttccagccgatcgatatggagccgtcttccatgggcctgaaggctgctgacgcttccttccacctcgaggccgacatccatgccaaccagaagggcaccgagctcggctacggcaagggcgacttcgtgccggatctgaccgtgaactacaccatcatcgataagtccaccggcaaggaagtcgagggcggcaccgccacctccggtaccttcatgcagatgaacgcttccgatggcccgcactacggcgccaacgtcaagctcgacaaggctggcacctaccagctgaagctctccatcgaatccccggcctccaagggttggatgctgcacgttgacccggagaccggcgtcaagggccacttctggaccgagccgatcgaggtcaccttcgacaactgggattacactcctcgccagtggtgattgactaagcagaaagccccctcgtcagagggggctttacgccgctttagggagataattcttaggacggtctaaaactcccctcagtccgcttcgcggacagctcccctcagagaggggagcctaaggtgaacagagaaaggacgcgaatgcttgaacaattcgtggcagtgatgccgggcactttggcccccgcattgctggtgatgagcctgagcgtgatgctcacggtcggcgaggggcgagataagccgataagctcgcattggcgtctcatcggcctgatcgtcggtctgatcgccgccatcgtattcgccggcctgcgcgcctcggccgtgatcaatcagcgcacgttcgtcaactacccggtgttgtggtgcgcgatcattgccgacatcctgaccatcgtcgtggtggtgttcgcacgccgcatcaccaccaattggcagcagcacaaggtgttcatgcacatcgctaacgccgtggccgccatcgacatcgcactcaccctgttctacgcgctgccggacgtgattctgcagctcaccatctgggtggaaccaggggagaccgcattcacttcggccatgctgctgcgcgctcttggtttcctgcttggcgtggccatgtccattattgtggccgccatcttccgcacgatgcgcaccactgccgtgcgctgggcgttcaccgtggccgtcgcggccatgatggtgattctgctgattcaacacttcactggtcttgcccagattctgcaggcgcgaggcttcccgatgaaccatacgatgttcgtggcgctggcttggtccatcaaccagaactccacgatgattatggcgcaggcgctggtgttcctgattcccgccgtggcctccatcgtggccggtttccgtatgaaaacccatgatgtgccgggagccaacgaggccacgttgcgccggcataaggtattccgccgccacgccatcgccgctgccgtgtggagccttatcgcagccatcggcgtcacagcaaccctgaccgtgggcgttgccgcgacccatcagaccatcaccctttcgccgccggaagcctactcgctcaaggacggcgtggccaccatccccttcagccaggtcgaggacggccacctgcaccgcttcgaatacaaggccaaggacggcaccgtcatgcgcttcatcatcatccgaaagaacggtggcgcgtacggcatcggcctggacgcctgcgagaactgcggcgacgctggctactacgagaaggacggcaagatcatctgcaagaagtgcgaggtggccatcaacctggcgaccatcggcttcaagggtggctgcaacccgataccattcccgtacaagaccggccacggcaagatcaccattcaaactacggatctggacgcgctgagcgcccacttccggtgagtcaggcaggagacaagaatcatgttctttctgcgcatgattactcgctcgttcacccgacagctgcgccggcgcctgcttatcgcgctgaccgtatgcctgtcggcgaccgtgtccgtatcgatgctgggcgtcgtgttcgacgtgggcgacaagctcaacgccgagctgtccacctacggttcgaacatcaccgtgcagcccaaggcggatgcggtcgtttccgacctgtacaacaccgagtcgggcggcgcgacgtccaccagcgacccgaccgcttttctgaaggagtcggacgcggccaagatcaagacgatcttctggtcgttcaacatcaccagcttcgcgccgcagctcaacatccacgccacggtgaacggtaccaacgtgccggtcgtcggcacgtggttcaacaagaacctcaagatctccaccggcgagactaccgtcgtgggcgtggaaggcatgcgctcgtggtggcagctggacggcaagtggcccaaagacgattccgaccagggcgtgatcggcaagacgctggcctccgaactcggcgtgaccaccggcgacaccatcaccctcaacaaaaccaccgcctcaggcaagaagaacgagcagaaaatcaagctcaccggtgtctacgattccggcgacgaggacaacggctcgctctacatcgactcctccacggcccaggtactcgccgacctgcccgattcggtcgacaaaatcgaggtcaaggccctgaccacgccggagaacgacctggcccgtaaggccgccgcgaacccggccgcgctgagccaggaggaatgggagacctggtactgcaccgcctacccgagctcgatcgcctatcagatcgaagaggtgattccgggcgcggtggccaagcaggtgcgtcaggtggccgcgttgcagggcaatgtgctgcaaaagacgcaggccgtgatgattctgatgaccgtgctgagcctgatcgccgcagccgtggccgtggccaacctgatggtcgcctcgatcggcgaacggtcgggcgagctggcgttgctcaaggcgctcggtgccaccgatgccgcggtatcccgcctgatgctggccgaaacggcggcaatctcgctgctgggcgcgattgtgggcgcgctgctcggttccggcgtggcccagctgataggccgggtggtgttcggttccggcattacgatgcggccgatggtgttcgtgctggtgttcgtgctgctggctgtcaccgtgctgctggcgtccgcctcatcgattcgttcgattctgaatctcaagcccgcggaggtgctccatggtcgctgagtttatctacgtaggtgtggaaggagggaaccgatgaccaacaccggtatgttcttcagaatgctgttcagcgccgtgttccgtcggcgttcgcgcgcggtgatggctgtggtggcgtcgctggtcggcgcagccacactgttctgtctggcgatgatttgcctcgctgtgccgcagcagatgaacgaggagatgcgtgcgtacggcgcgaacctgattgtcacgcccaccgaatcgaccaatgccgacggcaaggccggcatcgacaaggcgatggtgcagcacaccactgaaatggtcaaggccaagggttccgcgaaatacgccacctaccgctacgagaacgtgcgcgtcaacgcctcgccgtacgtgatggccggcgtgaatgcggcgcaggtcaagaacctcaaccatcactgggtggtcgacggctcgtggccgaccggcggcaaggtgctgatcggacgcgacatcgccgacgccatcggcctgagaatcggctccgccatcaccatcggctaccgtgcatccgataacgccagcgccaacggcacttcgtcgaactcctcgatcgaccagcaaaccaaagacggccgtgtctccagtgacatcatggacacctccggtaccgaattccgcgtggccggcatcgtggacaccggcggcagcgaagactcgatcatctacgccaccaacgccgacgtcaacaagctcaccggcatcacgcgcggcgtggacgtcatcgagtattcggccggcgccagcgatctcgcaggcctggtgtccagcatcaacgacatgacctccatgcacgtcaaggcacagcaggtcaccaagatcaccgcctccgacacccgcatcatcaccatgctgcagacgctgttctggatcgtctcgctggtggtgctggtgctgacgctcgtcggcgtcggcaccacaatcagctcgatcgtctcgcagcgacgcaacgagattggcctgcgcaaggccctcggtgccagctcgcgtgccatcggcaccgagttctacatcgaatcgtcgctctacggcctgattggcggcctcatcggcaccgcaatcggctacggactcgccagttggctgtgcgtggcggtgttcgaacgctccatcgtattcaactggtggctggccctgatttccgtgctgttcagcgcactggtcgccatcgtcgcctccatcccgcccgtccaccgcgccacccgcatcgaccccgccgtcgtgcttcgcgaagaataaagaaagagaaacgtcatgctacttgaactcgaccacatctcgaagatctacggcgacctgcgtgccgtggacgacctcaatctgaccgtgccggaaggcgaatggctcgccatcgtcggctcctccggctcaggcaagaccacgctgatgaacatgattggctgcatggacacgccctccaagggctccgtgaagctggaaggccgcaagctggaggacctgaacgccacgcagctggccgacgtgcgcaagaacctcatcggactggtgttccagaagttctatctggtgccgcacctgaccgccgtggaaaacgtgatggtggcccagtactaccattcggtggtcgatgagaagcaggccatggaggcgctggaaaaggtcggcctgaaggaccgcgcccaccacctgcccggccagctctccggcggcgagcagcagcgcgtgtgcgtggcccgcgcgctgatcaacgacccgaagctgattctggccgatgagcccaccggcaacctcgacgagaagaacgagaagatcgtgctcgacctgttccgcaagctgcacgagcagggcaccacgattatcgtggtcacccacgatgcgctggtcgccagctgcgcgcagcgcgagatcatgctcaaccatggcgtgctcgtcggtgagaagtggaatgacgaggatgcgcgcaaggcctacgaggcggccggcggcaagcccgcctccacgggtgcacaggtcgagggcgcgcagaacggcgagaccgccattggtttcactgaccccaccaaggccgcgaaaaccggcggcgaggagtagggccgtcaggggcatcgagcagtatgtgaggaatacatggcaagctgatggtctctcccccagtcagcttcgctgacagcccccctcgtcagaggggggcttaaggagcgtgaatatgaccgaaaagaatacgttgaagaaatccgcgacattggcggcggccggactggtcgtggctggcgcgctgctggccgggtgcggcgaatccaaggccacgccgatggacgatgcgtacgccggcaactcgggcgagaccgagaagtcgcaggaagagcagtcgcaatcccagtcgaacggctccgatagctccgacggctccgattccagctcgtcgcacaacgacccgtccaccaccacgtccgacaagaaggacaccggcaactacaaggacggcaactactcgatcaacggccagtacggcccggtaggcgaggattccatcgacgtccatctgaccatcaaggacggcaacgtcgagaccgtcaatatcattgggcacccgttcaccacgatttccaagaaccatcaggacgacttcgccaaagccattaacggcgtggtggacggcaaacctctgaagggtctcaaagtggacaaggtcgccggcgccagctggacctccgacgccttcaacaaagccctcgaagtcgcccgccaggaggcttcgattcaggagtaagaccgctacttcagcaatgctggccacagcagatcggccatgcgcgaggcccaggcggtgtcgtcgtccattgctttgccctcgatggcctcatacgccaccaaagatccgataatcgtggacaacagcaacttctcgtcaacgtcctcgcgaaacacgccctgcgcgactccctgcttgaggaacgcccccacacgctccagccacggggtcaccacttggtcgacgatgtgctggaagaactcggcctcgctggacaatacaatgcccacgcgcttgacgtcgatgtcgttgtcgcgcacccaatcgaccaatcgctgcaatagttgcgtgaaatgctcacgcgtggggctgggcactgggtcggaatccgggatggccagatacatcgcgctgatctcgtgcagcagctcgtcggcattatgatatcggcggtaaatcgtggttttggccacaccggagcgccgggccacctcctcgatggtcacgccgctgatgccgcggtccaccgcaatctgcagcgtggctcgcatgagcttgcgatccgtcgcctcgcgcgtgcgctcaccgcgcggtgtcgccgtcgtgtctgtcatctccgtcatctcttctcttcgaaatatgctcccgtacgctcccgctggcgagagctggctggcaaagccagactgagggtggtaagtccatgccgtttgtaggcaactcccggataatacctactagctcagcactttagtgctctcgacttgggctacataccactggttgaaccgcaccagtggcttcctgagcaacagcccaagcaacagtagcggcggcacgaatgccagcagcattccggcggcccgccagtaatccatgtcgtagatgccggcgatggccgcacgcatcatcgtcaccgcatgggtgagcggcaagagcggactgactttggcgatgaagtcgggcaacatctgcaccgggtaggcagcgttcgcacccgaaatctgcacgatgagcataagcacgccgattgccttacccacattgccgaaactcaccaccatcgtataggtgaagaacgagaacaccagcgaggccagccatccagacaacataaacagcagcggatgcacggcctgcacgcgcaggaacagcaaatcgccaccgagcgacaccgtggattgcagcagcgcaatcagcgcgaacaccccgtaatgcccaaggaagagccgatgcggccgcggatcgcccaatgctttgcgcgtccggcgagacacggtggttttcagcgtcaccaccatcagcagcgcgcccacccacagcggcagcagcgtgtagaacggtgccatcgacgaaccgaaattcgccaccgggaatacggccttgcgcctgagctgcaccggtgcggccaacgtactggccagcgtttcgggatcattgcccagcacctctttgaccatgcccatatcgccactgtttagtgcgtcgctcagtgtgctgttgaacgaagccagttcggcaccggcggaacgcagtttgccggacaccttgtccaaggtagtgcgagcgtcgctgagcatatcgctggcgtcgtcggaagtccccttcaggtcgccgagcgtggagtccaactgggtggcgccggaactcagtatgccggaggcgtcagcgacggtggacgacagggagtcgatttgcggtttcaccgtggccgagaaatctgacttgatattggcaatactgttctgcgcttgatcagccagattcttgacctgcgcatgctgatcctgcgcgtcctgattgccttggcgaatatcggtcgccgccgtattcagcgcttgccgcagcctgttttgtcgtgcgattgaacggtcaatcgccgtgatgatggatgagtcgttgcccagtatgccggccaacgtgttgcgaatttcagtgtatttctccgtctgcttgccaatggccgtggcttgacggtccaattcgtcggcgaccgtggtggcaccatcattcgcgtcggaatacagcttgtctatggaatcggacaccgcgccgaaactggaggcgctcgcgtccagtgcgctgctcatcgcgtcagcggtggtgcccagggctccggccacgtcggtgacttcctgtttggcgctggcaagatccttgccgccttgtttggcggcagaggaaacctgagtgattagtgagttcgaggtgtcgagcaaggcgccggccgtatcggtcaatgcgctgtatgtgccaagcagatccgcagtatcgtcaagctgtgtggcgaaattggcgatgttggcgttgaaggtattcagttgctctttggcctcgggcttggacagctgatcggccagcgaagacgcgatttccagcccggccgaagtgatggtcttagcgaacgtggtgttgatttccgccgcaacctcatccgtgccctcgttgagcagattcggtgccagcgcgttcttcttctcgttgcggtaataggtcagttcggcatgctgcacgtcgtcggagaagaaggtcatcatgtctttgctgaacgacttcggaattacgatggccgcgtagtatttgccggatcgtgcgccctcgacggcatcggctttggacgtgatcgtccaatcgagctgactgttggcgcgcagcgcgttcaccacctgatcgccgaccgtgactttcaccgggatcaggtcggaacgatacccctcatccacattcgccaccgcgaatttcaggttcttcatattcgagaacgggtcccagcatgcggccacgttgaaccaggtgaacaggccgggaatcatcaccaagccgatcacgatgatgatggagaccacgttgctggtcaggcgtttgatgtcgccggtaaacagtttccacatggtgttcatcgtgcgtgcctgccttccttggtcggcggaatagtggggatgattgcggtaacagcggcgctcgggtccgcttcttcgtggcgttcggcggaggtgtcgcgacgcttggccttatgcccgtacagcatggcgcggatcgactcgtcggagaggctgccgagctcggtttggcggcggatggaatcgcgcatgaattccacgaccatcaggaagcccatgatgatgagcacccatgccagccatgtgcccatgactacgattttctcgctggtggtcagcgcaaacacgataatgagcgcggccggcaccacgaatccggcaataagcgcacccagcagcagccggggataacggtaggcgaatttggcggcccgacgttcgatggcatgacggtattcgtcgtggtcggccagtgctgcaatggcctgagtgacacggtattcgctgccgggcagatgcaccggctcgccgataatcatgtcgctttccttgatttcccgcgcgaacaggcggttgagattggccagtttcggccgggcgccgaggccaagcgcaaaggccagaaccacgaaaaccagcaatttgccgatataggcgaaccagaggccgtcgtagaagccgccgatggtttcacgcatcgcgtcaatcgaataggtgaacggcagcagcgggtagatggcgcggaagaacgcgggcatcatttcaatcgggtacaggccggaggcgcccggcacctgcagaatgaccagcgccacgcatacgcctttgcccacgtgcatgaacgtggtggagagggcgaaaatcaccgacatatacaccagtgaggtgatgacgcaggtgagcagaaacactggggcgctcgcgcattgaatgccgatgacaagatcgccgatggccgtgaccaggccttggacggcagccagcgtggccagtagcaggaagcgaccgagatagccttgggttggtgtgagatcgtcgatgcccccatcatcggtttcgagtttgggaatgaccacgagcacgaacgcgcccacccacaaagacagggtggtgaacagcggtgccatgccggaaccataggaggcgaccggatagacggcctgttcgctgataacagtgggggagagcatgaagtcggcgattgtggcggcatccagtttgccgtcggtgccgatcagggaactgagtgaactggagatgctcagggctttgatgtcggtgaccagcgtatcgagcttggtttgtacgccggccagcgccttatcggtgtcgcgcagcgcggtcaccgtggtggaggctgctttgtcgagttggtcgagggtatgcttcgactgatcgatgagtgagccttgcgacgtgatgccggtcgacagagtgctggcggtcgagctgagggcgttgagaccggtgttgagctgaggaatggcgccggaggtgatggtgccgcgagcggtattggcctcgcgcaccgtggtttgggtggcggtattgagatgctgcgccaatccggcggtgtctgtggaggcattgccgatagtggtgttcaggctatcgaggttgcccagtgcgccggcaagctcgctattgcggctttccagtgtggcaatggcggattgcagcggttctcgattggcgttcggcagccctttgagttggtcgatgatgtcggcgttcgcttggttgatgtcttccgccgtattgatcagtccgcctacctgctgattggcggcgctgatggttccggttaccgtgcccacgctttggttggcctgtgctgcggcttggctcagcaggcttgagccttggtcaagcgcttcggacgtggaggtgacgaagccgttcagactggtctgggtagtgccgatcagggtggagacgccggccagaccttctgcagtgtcgatgccaagtgtgcgcgcgtcgtccagcgcctgacgtgcggtgcgtgtctgctctggggtgtcggtgagtttggtggtgagcttggcgatggtgctgcgtgtgtgctgcacatcgtcggaggccttggcaagggccgtgagggccttggctttggtggtgtcttcggtactgatggctttgccgtcaaccgtattgatgacttcggtaagtacttcggatacggtggagacgaatgtggaattgaccgtgcggtccacagtggacgcgccgacgtcggtgactttgggggcgatggcgctggctttttcgttgacgtaatactccagagtgggccgactcttgccgccggtcaccacgccggcgagatcgtcggaaaagtctttgggaatgatgatggctgcgtatgccttgccggattccacttggtccatggcctcggcttcggtgacgaaggtccagccgagctggtcgttgcttctcatctgcttgacgatttgatcgccgaggttctgcttgccgatgagcgcgttgtcggtgccgtcgtcattgttggcgatggcgacggtgatgcctttggtattgccgtacgggtcccagaagccgacgatgttgtaccacgaatacagtggcgggatgaacaccatgccgaacaggatcacccatgcggccggcaccttgaacaggcgcaggaagtcgcgtctgaggaccttgaagatattgcccactgatacctccggagcttggtgttgcttggttgctacgttttccgtagcgatacgttaatcgtagcgctacgtttgtagtagcgtaatacggctgccggagattaatggggtgattgatgatgtttttggcggaataacgctgctgcccagcggcttatcgtgtgtcgctgggcagagcgaaaggcgttctggaacttattgacaagatttctggatggtttttggacgtttcctgaacgcgatggataggctcggtgctcggcaatgtagacagacatgtaccgaccgcccatcaagttcagcaaaaccgcaatcgggtgatagggtgaggggacgctatgtggggaggaaaccatggttgaattcaaggacgacggcacggccactacccccggcaagctgcgggagaaccgtgacgccgagtccgcagtcgtggccgatctggtggccgtcgaactggacgacgccggcttgaacctgaacgccaagcgattaccgattctggcgcgcatctatggcgcggtcgtgctgctggacggactcgccacattgccgattatggtgatttccatcctctatgccgtgcgcgagattctggatggtcatgtgcacgtcgatgcgatgagcctgaccttcatcctgtccgcgattcatgcggtggtgctggtagtcagtgccgcatgcctgattgtgctcggcgtgatgctgctgcgcaatcatcgccggtatgccgcgcgctggacctacgtgctgatgccgttgacgttggccgacggcatgctgtcgctggccctgaccggccttggcttcaacctgctgctgccgctgattcagatgattattctcgtcgtgatttcggtgaccgccgatccctccctgagcgaggaacgccgtctgcagcgcgcgctcaggcgtatggacgatcgcgatgattatgaatcggctgtggcggccggcatgctaggccgcgaccagtccggcaagggctatattgcgctggactttttcaatatcttctggctgtttaccatcgcttcggtgggtggcctgattgtggagacgatctaccatatggcgctgtataacggtgaacttcaggaccgcgctggtttgctgtggggcccgttctcgccgatttacggctgtggtgcggtattggtaaccgtgtgcctgaatcgcctgtggaaggcgaatccgttcttgattttctgcgcttcggcggtgatcggcggcgcgttcgaatattgcaccagctggttcatggaagcggcgtttggtattaccgcgtgggattacaccggccgttggctgtccatcgacggacgtacttcgggccaattcatgttcttctggggactgattggtgtggtgtggatcaagtggctgttaccgcgactgctggctctgattaatcgcattccatggaaagtgcggtattcgctgactgcggtatgcacggtgctgatggtgatcgacattgccttcacgctgatggccttggattgctggtatgggcgcatggccggccagccgcaggattcaccggtcgcgatgtggttcagcgaacgctacagcgacgcttacatggccaatcgcttccagaccatgcatatcgacccttccaaggccgggcgtatgtgaatggccggcaagtaattacgcttcgcgggcagaaggtgcgtagaacctaagacagccctcgcgtgtgggtggtaagcgggatacactttcaagcgttgaaggaatgattccctccgctgatgcgctgttttgtgacgcgcgtgatgacgatgggacaatcaaacgaaaggcaaggcacatggccgaagctacagcaaacattggtgtgattggactggccacgatgggctccaatctggcgcgtaatctggcgcaccatggcaacacggtggcgttgttcaaccgtcattactcgcgtaccgagaagctcatgaacgagcatggcaccgaaggcaacttcgtgccggccgaaacgctcgaggaattcgccgcgtccctgaagcgtccgcgtaccgccatcatcatggtcaaggccggtgctccgaccgacgcgaccatcgcgcagctggaagaggtgttcgaaccgggcgacatcatcgtcgacggtggcaactccttcttcaaggacaccatcaagcgtgagaaggaagtacgtgctaagggcttccacttcgtgggttgcggtgtgtccggtggtgaggaaggcgcgctcaacggcccgtctctgatgcccggcggcactgcggaatcctggaagaccttgggcccgattcttcagtccatcgccgccaaggtgaacggcgaaccgtgcgtgacccacatcggcaccgatggtgcaggccactttgtcaagatggtgcacaacggcatcgagtatgccgatatgcaggtgattggtgaggcgtatgacattctgcgccgtggactcggcatggatgccgaggagatcggcgacgtgttcgctgaatggaacaagggcgatcttgattcctacctgatcgagatcaccgctgagattctgcaccacaaggatgccgagaccggcaagccgttcgtggacgtggtcgtggatcacgccggcatgaagggtactggtacttggaccgtgcaggctggtctggaatttggttctcctgtggctgccatcggtgaagccgtgttcgctcgtgcactgtcttcgcacggtgagctgcgtgaagacgctcagaaggaaggtctggctggaccgaacaagaccatcgatctggccggagaagacaaggccgcgttcgtcgaggacgtgcgcaaggctctgttcgcttccaaggtcgtggcctatgctcagggcctgaacgagattcaggacggtgccaaggaatacggctgggatatcaacctgtccgaagtggcccgcatttggcgtggcggctgcattattcgcgcccagttcctgctcgaccgcatcaccgaggccttcaagggcgataacccgccggcttccctgctgttcgatccgtacttcgagaagatcatcggcgaatcgcaggacgcatggcgtcgcgtgatcgttcgcgcggtggaggccggcatcccgaccccggtgttctccagctccctggcttactacgatggtctgcgctccaagcgcctgcccaccgctctgacccagtcccagcgtgacttcttcggtgcccacacctacggccgcgtagacaagcccggcgtgttccacacgctgtgggctgaagaaggcaagcctgaaatcgaggcgtagcctcgtgatttcaggtttaggacagccctgtgggctgtccggccttcttcaggctcggcgatagccgagctgagaaaacagcaagcccgagatcgaggcgtagcctcgcgatctcgggcttaggggagcccggtgggctccccggccctcttcggagcgaggcggctatgccgccgagccaacactgagcctcgccgcaggcgagtccctaattgcaggggccggcggcgaagagggcaagtccgagattgaggcgtagccatagacgaattaagccccctcatcagagggggcttaattcactcacaactcggtgacggtttcttcggtggagaaccagatgaactcgtccactccgttggcgtaggaggacgggtaatccgggttgttgggctgctcgaagacatgggccagcgattcggctttgccggcaccggcggcgaagaaccacgtatggcgtgaacgcgcgatgagcggcgcggtcaatgaaacacgcagcggcggcatcttgggggagtggttcacacccacggtgagcctatcagtaaccttgacctcatcatgaccagggaacagcgacgcatagtgaccgtccggtcccatgccgagaatcatcagatcgattaccggttccggccccaattcattcaccaactcgcgctcatagtcgctcgcgacatcgtccagcaacgcatcattcgcggcatcggcggcggcgcgaacggaagcatcatcgctgtcggcctgatccatcacatcggcgatgtcatcggctgaacgggtatcggccgccatctcatgaatattcgactcaggcagcttgccatctgccaccagctggtcaagcagcaggcgacgggcctccaaagcattgcgatcggtgtcgtaagccggcacaaaacgttcgtcgctccaccagaaatgcacgcgcgaccaatcaatcgcgtcagccagcggatcgttcagcaccaagcccagcggctgcgcggccgaaccgccagacagcgccacatccacacgcgtgcgatgcgtgccatcaggcaatcgttcggcgagcaaatcgagtagcgccaagacaaaacgttgcgcgccagcctgaatcatcagatctttattcggatacacaatgagttttcgagttgccatgtatggtccttgtatggggtatgtgtcgtactttgcaatgtggattgtgttgtcagttgacaacacaatccacattgtgcgacatcgcatatgtcactttattactccgcgggcatgagcttcggcatcgcatgaggtaggaaacgatgagcagcggcgttggcatggctcggccacaattgccgaactcatgccaacgccgctgtggcaacgggttctaccgacttcagtgacgaatcagatcccagccttcgttgatgacctcggcgtagatctcatcgggatcgatgcgacgcagttcctcggtcaggcagtcctcgatggtgcgcatcggcacggacacttcctgcggagtctggccgggcagcgagatcagcgcttggtcctcatacgggcgttccagcgagatcacaccgtcctcacgggtcaggtacacgccggtcacggcctgcgcgtcgggcacgaactcagtttcgactggtacgccaagtttcagacgcagccatgcgcacagcatttccagaggcaggaagtcggccttgccggtcaccttcacggcggtgatgggcaggtgcggcggctgatcgagcatcgaggcgagcattgcgcgccagacggtcagtcgtgtccaggacaagtcgatatcttccggtgtccaattgcggcgcaaacgctcaatcgtggcctccggattattggagtgcaacgcgtcggtgatgcgactgcgggccatcgcacccatcagatccttggccgggttcgacggcggtgtggtcggccaccacgccactacaggcgcatccggcacaagcagcgggataaccagcgtatccgggtggttgataaggccaccgcgcggacgcaagatgatgatctcaccggcaccggcgtccgcgccgaatcgcacttgggcgttcaggttggaatcgttcggatcgttcgggccgtcggtcaaatcgacggccggattatcgcgactcgcgctcacctcggcggccacttcggccgcgttcggttcgccttcgccggactgatcggcaggattggtatccggtactacggcaatcacgcggcacgggtgctcacggctggccgagttcgcgatttccagcgcatgctctaggtccgcgtcctcggtggcgatgagcagcgtcagcacgcggccggtcgccgattcgccgcgctcctcgtgcagctgttcgattttgtgcgcaatctcgcgggtgcgggtgttcggcatatcgatgatcatggcatcctccagtggcggccgtcgcgcgccagcatttcgtcggcctgtgccggaccccacgtaccggcgcggtaggcctgcggctggccaagcgtggaccagaattgttcaatcggatcgaggatctcccagctgaggttcacctcttcggtggtcgggaacaacggcggatcaccgagcagcacgtccagaatcagtcgctcataggcttccggcgagttctcggtgaaggagcggccgtagctgaagtccatgttcacgtcacggacctccatggtggagccgcccggcaccttggctccgaagcgcatggtgacgccctcgtcgggctgcacgcgaatcacgatggcgttcttgccgagttcgcgcacggcggtctgctcgaacggcagatgcggggcgcgcttgaacaccacggcgatttcggttacacgcttgccgaggcgcttgccgcaacgcaggtagaacggcacgccagcccagcggcgggtgtcgatatcgaggcggatggcggcgtacgtttcagtggtgctcttggggtcgatgcctttttcctccaagtagccgaccacttcgtgcgagccctgccagcccttggcgtactggccgcgcgcggtgttggcagcaaggtccttgggcaggcgcacggcggaaagcaccttggtcttttcggcggtcaggtccttggcggtgaagctcaccggctcctccatggcggtcagagccatgagctgaagcaggtggttctggatgacgtcgcgtgcggcgccgatgccgtcgtaatagccggcgcggccgccgatgccgatgtcctcggccatcgtgatctgcacgtggtccacatagttggcgttccagatcggctcgtacatggcgttggcgaaacgcagggccagcaggttctgcacggtttccttgccgaggtagtggtcgatgcggaacacggagctcgggtcgaacacttcggataccacgctgtcgagttccttggcgctggccagatcatgaccgaacggcttctcgatgatcacgcggcgccatgcgccctcggacgagcgcgacaggccggaggcggccaactgcttggcaacctgtgggaaggcgcgcggcggcaccgacatgtagaaggcatggttaccctgcgtgccgcggtcgcggtcaagctcctgcacggtggcgctcagacgctcgaaggcctccgggtcgtcgaacgtaccctgcacgaagcggatgccggcggccagattgcgccaagttgactccttgaacggcgtacggcaatgcgcctggacggcggccttgacgaattcgatgaaccgttcctgtgtccagtcgcggcgggcgaagccggtcagaccgaagctcggcggcagtaggccacggttcgccaggtcgtagacggccggcagcagtttcttttgtgccagatcgcccgtgacaccgaaaatgacgaggctgcatgggccggcgatacggggcagtctgaggtcgcgcgagtcgcgcaggggattgctccaattgggggattcactcataatgtacaagggtagtcgccggcggctatctatcgctagaggcgatatgcgatttgggctgcgatttgggccacattgcgtgtgctgtgccgtgcgttgggccaatcgcgtacgcaaacgtatacgcaacgccgtagttgaaatatcccaaaacggtgtgtattttagaagagttgcccctttagctcaacggttagagcagcgtccttttaagtcgtgggttgtgggttcgaatcccacagggggcacaacaaatccttggaatcgcaatggttccaaggatttttttgtttcgaccagcctggctcctagagtggtgtcccatgtcatgcaccacgattcttgtcggcaaaaatgccagttacgacggttccaccatcatcgcccgcgatgacgattcgggctcgggccgttacgatcccaagcgcttcgtcgctgtcgcccccgacgaccagccgcgccactaccgcagcgtgctgagccatgtcgaaatcgaactaccggacaatccttgccggtacaccatcgcaccgaacgtgctgaataatcgtggcattctggccgaagccggtgccaacgaacacaacgtggcgatgagcgccaccgaaaccatcgctgtcaacgagcgcgtgctcggtgcggacccgatggtcgagttgcggccggctgtcggcgaaccggacagcaacgattatcaggccgagcagcccggcggtatcggtgaggaagacatcatcacccttgtgctgccgtacgtcaccaccgcgcgcgagggcgtcgcgcggttgggcgaactgctcgaaacctacggcacctacgaatcgaacggcgtgattatttcggatgtggacgagatctggtatgtcgagaccatcggcggccaccattggatcgcccgccgagtgcccgacgactgctatgccacgatccccaaccagctcggcatcgacgacttcgacctcgccgatgcgttcggcgggcagcgtgaatacctatgcagcgccgacctgcgcgagttcatggccacgcatcacctcgaccgcacaatgggaacgccggtctcttccaacggccgtcacgcgcatagcgccggattcggaacaaccgttgcccttcccacccgtttcaacccgcgcaaggccttcggcaccgcgacgccgaaggaccatatctacaacacgccgcgtgcctggtacatgcaacgccgcctcaaccccagcgaggactgggattcgccggccgcccgctacacgcccgaatccgacgacatcccgtggtgccgcgtgccggaagacaaggtgagcctcgaagacgttgatttcctgctgtcctcgcacttcgaaggcacgccgtacgacccgtacggcacgaccggcacggcggaatcgcgccaccgttaccgtccgatcggcgtgaaccgcaccggccatatggtggcgattcaggtccgcccgtatgtgccggcggccaatcgcacggtgatgtgggtatcgttcggctccggtccgttcaccgccgccgcgccgttctacgcgaacgtcaacgacacgcctgcctacctgcgtgacaccacgcccgaagtctccaccggcaacctgtattggacgaaccgcctgatcgccgtcgtagccgacgcgcattggtatgagacgaaccggttcatcgagggctatgcggaaggcgtgcgcgcgttcgggcaccggctcatcgagcgtacggatgagcagtggcttgctcgaagcgatgccgaatcgacggatacgaatgcatggccgctcgatggcggccacggcgatgagaaggatgtgcagggcgtggcggatgtgctcgaagcggccaacgacgagatggccgactacctgcgcgagcatacaaccaagctgctgaacgacgtgctatacacctccagcaacctgatgcacaacagcttcgcgatgtccgaccgttgggccgagtagcaaaacctcgactggggaggtaacagggatgccctgctgataacgcgtcagcagggcaaaaccacaatccgaatcagttaaagccgacgatgcgttcggcgatgagatagccgttgcgcacgatccagcggccggttttgccgggcagattgagcgcgcgggacatcagctgcgagcgcacatccttgccgatggccggagaataggcgtcaatcgcatcccacagctcggttttcttaacgtagttggccggatcgcgcgagagaatcaggaacaccgaggtaacgcacgattcgatcgccaggaagtgaatcatgtaccggtacagcccctccggcaccgtaccgcgttcgggcgtggcctcggtcatcagccgattgacgagccgcaactggtccacacgcttaatcatcacgtcggtctgcacgctctgaccctcgcgcccgatgaagtagtggtagaacggcacatcgaggtactggatgcgcttcacccacgggaacggctggtacgagtaatagaaatcgacgtagaacgtatgctccggcagcttcagcccggaatcgcgcaccacctgcgtgcggaaggtgagcgcatgcatgatgatgtactgcgccagaccgaacttgcccaggtcatcccagccgagtacacggccggcctccatcacacggcggaagttcactacggtcttgtgacgcttggccaccttgtcatacacgtaattggtcaccagcatgtcaatcggttcgtcggtgtcatgctgtgcacgcaacgtggccagaaccgtgtcgatggcctgcgggtcgacccaatcatccgcatccaccactttgacgtacatgccggtcgccgccgcgataccggtgttcaccgcgccgccgtggcccttgttctcctgatgaatcgcgcgtacggcgcccggattggtgcgttccagcttgcgcgcgtactccagcgtgccgtctttcgaaccgtcgtccacaatcagcacctcgaggtcgctgatgtcgcttgccgaaagcaacgagttcacgcaacggtcgaggtaggactccatattgtatgcggggatcacaaaggtgagcgtctttgccgtgctggccatgaaagtcttacgtcctcacatatttagtcgttatgttcagtttcctgttcaaaccgtagcacttcgcctcccgactcggcagagtgttgcgtaacctgtgcccctgaactcatgttctgcaaccctgaatcttccccggtggcgtgctcgggatccgattgggcagaactcgtctggtctgaatccgggctgccggaatcggactcgcgcttggctcggcgctcggcctccttccgcgccttggcgccctcaaagaacaactggggcttggagtcaagccggctcaggccatgccaggccaaatccacaatgtatgcagccagctgctccttgctcacctttggccggtcggcccagtactgcccggtgaatacggtcatgcccaccagcatctgcgcgtagtacggcacgcccttggcagacagcttctgccgtttgaatgtttcggaaagaatgtcttcaacgcgtacggcgatgtctcccatcagcgagctgaatgagccggacgggtcggtgctcggcgagtcgcgtaccagtacctggaacccctcggcattctcttcgatataggtgaggagcgcaagcgccgtgcgttccacaatctggcgcgggtgcacggtcggatcgtcgagcgcggcggtcagcgtaccggtcagcgcgcgcatctcacgatccacaatgacggcatacaggccctctttgccgccgaaatgctcatacacaatcggcttggagactttggcgtgcgcggcgatttcctccacgcttaccgcttcgaagcctttggcggcgaatagcgagcgtccgacttcaatcagctgctcgcggcgctgcagcgacgtcatacgtgaagaatgtgccatgcggttcagcttaagtcgccgggtggaattgtcggcctgagactgccgaattcgtaggggattccatctgcgggctagacttgacaggtatggatatgaatactgtgctcgccgttcttggcgtgattgtggcggcggttatcgtaatcgccctgagcatctggttgggcaagtcccgcaagcgcgatttggatcgtgcgatgggcaaggttgcccccgacaacaagaagacccgcgacgccaaggccgccgccgacgctcggctggccgccgaagccgaggaagctaaggctgcgactgccgccgagccggccaagtcagccgaatcggccaaagccgagcctgcgccagccgcgcaggccgaacccgaaccggcagctgcgcccaagcccgagtcccaacctgcctccaagcccactcccgccaaacctgaaacccccgaatcggtcggctctcgactgacccgactcaaggcaaaacttgccaagtccggcaacccgttcggcaaggccctgttcgacatcctcgccaaagacaatctctccgaggccgattgggaagacgtcgaagacacactgctgcttgccgacgtcggtgcggatgcttccgcccaactggtcgatgacctgagaaccgacgcccgcatcactggtaaagccgacccagccgaagtacgcgccacgctcaaggagaagctgctcgatctggtcggtcgagatacggaccgccgcctcaatgccgaaaagccgggtgccgccaagcccagcgtcgtcatcatggtcggcgtcaacggcaccggcaagaccaccacggccggcaaactggctcgactgttcgtggccgaaaacaagcaggtcatgatgggtgcggccgacaccttccgcgcggccgccgccgaccagctcgaaacctggggtgcacgcgtcaatgtgcccgtcgtccgctccgacaaggacggtgccgacccggcatccgtcgcctttgaggcatccgccaaggccaaggaagcgaacgcggacgtgctcatcatcgatactgccggccgactgcagaacaagtcgaacctgatggacgagctcggcaagattcgccgtgttaccgaaaagaacctgccggtggatgaagtgctgcttgtgctcgacgccaccaccggccaaaacggcatgacccaggccaaggtgtttgccgaagccatcggcattaccggtgtggtgctctccaagcttgacggttccgccaagggcggcatcgtgatcagcgtgcagaaggagctcggcgtgccggtcaagctcgtcggtcttggcgaaggtccggacgatttggcacctttcgatcccgaaggtttcgtggacggcattctcgcgtagacggtcgagctcttctcagtcgcgctttgctcgacagctcccctcagcgaggggagccctgcgtccgtccacgttgtgggcgcgggaaacgcccgcaacgcaccaaacctagccccgaagcatattcgaaacatgattcggggctttcccatatccgttggaatcatgccggaatcagcccatccgataccaacctaactgtcaggtgcgcttaacaatcgcgtaacttgccgtaacgaaaccaaaacgagaccggcttttactgacgaactgttagcccccacaagggggacggcattgtagagacaaagtcgacgccggccgcgcaaagcctccggtgccctgaacgaaagagagggaggtagacatgggagcgattgattccggtaacaccgcatggatcctgacatccgcgtccttggttttcctcatgacgcctggtgtggcgttcttctacggcggtatggttcgtgccaaggccgtcctgaacatgctgatgcttgaggcggccgccctgtcggtcaccatgattatctggaccctgtggggttggtcgattgcttacgccggttccgacatcggaggcatcttcggcgacccggccagcggcttcctgctgaaggactccatggtcgcccaggacggcgtgttcaccgccaccggtctgaacggcaacaactacccggtttccgtggacgttgccttccaggtcgctttcgcgatgattaccgtcggcctgatctgcggcgccattgccgagcgtgtgaagtacagcacctggatgattttcgtggcgctgtgggtcaccttcgactacgctcctatggcccacatggtctggaacggtggtctgctgtctgctgacggcgccatctccaaggccatcggcgcggccgcccacgatttcgcaggtggtactgtcgtccacatcaacgccgcagtcgccgccctgatcatcgtgctcatcatcggcaagcgtaagggcttcggcacgcagccgttccgcccgcacaacgtgccgttcgtgatgctcggcgccttcctgctgtggttcggctggttcggcttcaacgctggttccgccttcgccgccaacggtactgctggctacgcttgggtttccacctccgccgccaccgcagccgcaatgctctcttggggcttcaccgagaagattcgctccggtcactacaccgccatgggtgccgcctcgggtatggtcgccggcctggttgccatcaccccggccgccgatgtggtctccccgctgtgggccatcgtgatgggtgccatcgctggtgtcctgacctgcctggcctgcggtctcaagttcaagttcggctacgatgactccctcgacgtcgtcggcgtgcatggcgttggtggtttcaccggcaccatcctcatcggcttcttcggtgaaggcaccggtctgctggctggtggcgactggaagcagctcgtcgttcagctggtcatcgctctcgtcgccatcctctactccgcagtgatcaccgcgatcatcgccttcgctctggagaagaccattggttggcgcgtcaccgaggcccaggaagtcggcggcatcgatcttgccgaccagggcgaacgtgcttacgattttgctggtactgccagctccgttctcaaggaggtgaagtgaaatgaagctgatcaccgctatcattcagccccataagctcgacgatgtcaaggaggccctcgcggccgccggcgtgcacggtctgaccgtgtccgaggccaacggctacggccgccagcgcggccacaccgaggtctaccgtggcgctgaatacactgtggacctgattccgaagattcgcgttgaagtgctgtccgatgacgcggatgccgaaacgctggttggtgtgatcatcaagtccgccggcaccggcaccatcggtgacggcaaggtgtgggtcgctccgctggactccgtggcccgcgtgcgtaccggtgagaccggttccgccgcgatctgataacacagacgtccatgcttagaaggggatggactgcataggaaaggtccccgcacgccgcgaattgacgccgtgcggggactttttttagcaatgaaagatgaagcaatgacttcagcagtagatggcttgaaacaacgattcatggatatgagccagccggatgacgacggcgtctaccggaatggtgcgaccaagcgcaaagcccgcacagaactggccatgcaatgcctcactgagctgtggaatgcggcctgcaaggatgtctctttccccgtgcccgactccggcatcggcttcgccgcggtaggctcgctggcacgtggccaactgggccccagctccgacctcgacctggtcatcatctacgagcctcgcacgttgagcgaccagcagctcaacgagttggccaacaaactctggtacccgctatgggacagcggtctggacctcgaccactccatccgcacgcgcgcccaatgcgaggaagtcaccgaccatgaccttcccgccgccatgggctggctggacgtgaagcccatcgccggcgacaccgctctgatcaccaccaccgccacgtccatcctcgaacgctggcgcaaggccgcccgcaagcgcctgcccgaactgctcgactccgccaaagcccgactcgacgaattcggccggctccaatacgtcaatcagcccgatatcaaggaggcccgtgggggtttgcgcgattcggtgctcgtctccgcgctcgccgcctcatggctggccgaccgcccgcacggcatttacgacgaagctgtggaacgtctgctcgacgtacgcgactgcatccatctggtggccggcaaggataccaacctgatgctgacgccctatcaggccaaagtggctgccatgcttggccttgccgatccgacttggcccgaaaacgagcgtgccgcctactcgatcgacgatttgcagacgctgcttgcccgtatcggccggcgcatctccttctcgcttgattccaccgcttcccgcgccgaacattcgctgacccacgaaaagccgcgattcgcgttcttccagatgttctctcagcgctctggtggcaagcgcgaagccccgcaattcgacgtggtggctcccggcgtggccaagcacgaaggcgaattggtgttggcgcccggtgccgagcctgccaaggatgccaagctggcgttgcgtatggccgtggcggccggcgaattcggtcttcccatcaacccgtctaccttggttaatctgaagcgctgcccgattcacgacaaccagtgggatgacgaatcgcgcgagctgtttattcgtctgcttgcgtgcggatcgaatcttatggaagtgtgggagagcatcgatttcgtggacattccgggtcgatggatgccggaatggctcggcgtccgcaaccgtccgtccgcctcggccgcccaccggtacaccatcgatcggcatatggtggaggtcacgtcgcgtctggggcgcgagacaccgtccggtggacggtacgatgacgatcatttcaaggcattgctgttggccggtatcacccacgacatcggcaagcgcgcgttcgtggccgatcacgccgccgagggtgcccgccatgtgccggtgattctcaagcgtatgggctacgcgccggacatcgtcgactgggctaccgtgctggtgcgtgagcatttgacgctatccgaatttgccacgggtaaggacccctatgatccggccgtggcggaggagttggccgaccgcttgcaccacgacaagatgctgctggatatgctgttcgacctgacccgggccgacggctcctcgctcggtgccaccgccggtgagaccatcaccaagcaatacggctggtccaagtggcgcgaacaaatcgtccgcggcatgtattccgccgcccgcgccgcgatgtaaacggaatcgcccaacgcttcgcgcggccgatacctacttcatccatgcgtccgaacgcacgcgcagcccgttggacagaccgcgcccgcccatgagcaccacgttgaacgcggcccagagcacggcggtacgcatcaggtcgctcgtcagcgccggcgtcaccatattggccagtatgagtatgagcgtcacatacaccacggcggtcagcgtgcaggtgccggccagatagcggtagtcgcgcgcgccgataagaatgccgtcgattgccatcatccagccttgcagtgggaagaagatgcccatcgtcaccatgcccacggcgatcagcgtctgaatatgtggcgtaggggagaagaagtgcccggcgaacaggccgactaccgcaaaagccgtgccgattaccgcgccggtgaccagtcccgcacgcccggtcgcccgcgtcagccgccgcgcctgctgcacgctgccagcgcccagcgttgtggccaccagcgtctggccggcgatgcccacggaatccagcatgttcatcgcaaaattccaggaggagttcacggcctgaaacccggccaacacggcagtacccatgcgcgcggcacaggcgaccgtagtcaccatggccgcacgaatcgccaatgtgcgaatgaacaatggcagtccgtcgcccccggctgccgcaataccggccaaacgaggccgcagactcgcaccatccgcccgggaccacagaatggcggggattaccaggaacagccccatgaaccactgagctaccagcgtcgccactccggagccggcaatgccccaattcagcacaataacgaacaacacatcaagcaccgtgttcaccaccgcgccgcccaccgcagcgatcagcgtgatacgaaccttctgcaatcctcggaaaatgccgttcgccgcatataccatcagcatgcctggcgcacccagcacgattgcgcgcgtataggtcacggcttgttccaatacttcgccctgaccgcccagtgcccggcataatggctcggcagccgcgaacaatcccaatcccagtacggtgccgatgctcaaggccagccacaggccgtcaatgcctgcctgcagtccctcgcgacgacgacccgctcccagcagatgtgccacctgcgcagtggtcgagtaggccaggaatatgcatagtccgactgccgtgaggatgatggtggagccgattgacaggccggccaacgccgcatccccgatatggccgacgatggctgtgtcgataaggatgaaggtcggttcggcgatgagctggccgaaggtcggcagggccagcgccatgatccggcggttggtggagcgggcgtcggtcgggccgttgctgacgtttgtgtttgcgccggcatgcggggtgccgaagccatcgcggtgtgtgatatcaccggaactggtggctttggcgtcggaagagtctatgggcacgctcacacgcatatcacgcctgactgcgttgcgcaagcacctgttgtgggcgcggaatgttatccccagactatccaccaagttatccccagtatgtggataacttagtggattatccccagaattatccccaaaatgtggataacttatttttctatccacattttgctttctgcgtgtcgcggcgctgactcataggtgaataaggaatgaaccgatgcgggcaaccgtttcgtttccatacgatatcgttcacctgccacgccacatcctatacttggaggctatgccagaaggaagcgaacactcgtatcagaatgggttcggcggtggcctggatcgtggcgatcgtggcgaccgcgcgggccggggcggcgcgcagacgtcggcggcggccggcgacccgattttcgaccgcgtgcccccgcatgatgacgacgcggaaatggccgtgctcggcggcatgctgatgagtaaggatgccatcggcgaggtctcgcagaccattgacgtcaccgatttctaccagcccaagcatcagacgatctataacgcgatcatcgatctgttttccgccagtcagccggtggacgtggtgctcgtggccaaccagctgttggcggatggcaacctcgacaaggtcggcggcgcggactatctgcacagccttgtcgcatccgtaccgaccgccgccaatgccatgtactacgcggagatcgtccatcagcgggccattttgcgcaatgtgatcgccgccggcaccaaaatcgcccagctcggttattccgccgagggatcgcaggctgaggatgtggttaacctcgcccagtccgagatctacgagatgtcgatgggcaaggtgcgtcaggactatgccgccatcggcccggtggtccacgacgcgctcgaccagctggacaaactgcagcagggcctcgtcaacaagggcgtgccgaccggcttccgcgacatcgacgacgtgacccagggcctgcagcccggacagatggtcgtcgtcgcaggacgtccggccatgggtaagtccacgctcggcatcgacttcgcccgcgctgccgcgttgcagcacaacatgacttccgtggtcttcagcttggagatgagcaaggtggagctcgctcagcgtattatctccgccgaaaccgatattccgatggccgccctgcgccgcgccgacgacatcacccccgaacgctggaacaccctgaaccggttctggaccaagatgcagaacgcgccactgttcattgacgacagtccgaacatgagcctcatggagatccgcgcgaaatgccgtcgtctgaagcagaccaacgatctgaaactcgtagtcatcgactacctgcagctgatgacctcgggcaaggccgtagaatcccgccagcaagaggtgtccgaattctcccgtgccctgaagctcttggccaaggaactcgaagtgccggttgtggccctttcccagctgaaccgtggcccggaaatgcgtaacgacaagaagccgcagctctccgacctgcgtgaatccggctcaatcgaacaggacgccgacgtggtgttcctggtccaccgccctgacttttacgacaaggaagaccgccccggcgaggccgatatcattatggccaagcaccgtaacggcccgaccgaaaccttccacctcgccttcctcggtgccacgtccaaattcaaggacatgccgcaggactacaacgccaatcagggggtgtgatgatggcaagcaacgtttcacgcgatgtttcgcaagaccaatcgtccgtggtgcagacctgcaaaccgtggtatgcgttcgccaccgtggccgcaggccgcttcgtgcggtttgcatcccgcgtcaccaaacatggcggttcggctttgcccggcaaagtcgtagaaaagattgaccccggcttcctgacccgtacgctcgggcagttgccgcttggcgtggtattggtgtccggcacgaacggcaagaccaccaccacccgcatggtcgcctcgatgctctccgatctggggctgaaggtgttcaccaatccgaccggctcgaacttcgtgcgtggcgtggtctccgcactgcttaccgaagtcacgctcggcggcaaattggacgcggacatcgccgtgctcgagctcgatgaggcgtacgccgtccacttcgtcaagcaggtcaagccccgttatgcgttgctgctgaacgtgatgcgcgatcagcttgaccgattcggtgaaatcgacaccacggccaaactgctcagccatgtggctgcggcgactaccggcactgtggtactgaaccgcgaggacccgcgtatcgccgcgctcgccgcgaaggccccggctggcaccaccgtgcgatacttcggcctcgccgacgatttgcgccactatttcccgtccgatgacgacatggccacgaccgtgtcggtggaaggtgtggccgggccgctcccctcagtcagaactcctctcagtccgcgaagcgaactgagaggagcttccacaggcacggcagaacttcccgccgacgtgacacttaccgccgtgggcgaccacaaggccaccttccagatggacggtcagggctacgccaccgacgtcaagcttgaaggcgtctacaacctgtacaacgcggccgccgcgctcgccgtggtacgtgcggtgatgcaagacaatgccgccgcatccaaggccaccgccgcagccaacgcctgcgccgtgtccgccgacgagctcatcgccgccgtttcccgcgtcacgccggctttcggccgtggcgaggtcatcgacgtcaacggttccccggtcgaactgctgctggtcaagaacccgatgggcttccgcctctcgctcgccagcttcgacccggccaacgcggacaccatgatcgccatcaacgacgaatatgccgacggccgcgacatgagctggctgtgggacgtggacttcacttccctgcgcgcgtccggtgtcgccatggtctccggcgtgcgtgcctgggacatgtcattgcgcctggggtatgaccaagtgccagtcgccgatacgaacaccgacctcgaacaggccgtcaccgcattcgtcaacgccaatcccggcacacgcaagcacatctactgcacctacaccgccatgctcaaaacccgcgccgtactgggccgcatcaccgaagtacgggacgcgggcgtgggcaagtaaccacccttcggcgctcgcgcgccacctcccgccagcggaaggggcatggtgagggaataagacgcttcccggcagcgggagaacatcgacaaggagaacgtgacatggccagaacaattgatgtggtgtccctgtatcccaaagacatgaacatctacggcgattccggcaacgtgctgactatccgccgccggctggaactgtacggttacgaaccggtcgttcaccagtacaatcaaggcgacgattggcccgaccaggtggaccttattctgggaggcggcggccaagacaccggccagaagaaaatcatcgacgacttctaccatcgcgccgacctgttgcgttcgcttgccgcagacggtacgccgatgctgatgatctgcggcctgtaccagctgttcggcgagtactttgaaaccgtggacggcacccgtctggacggcatcggcgttatcggtgcttataccgtgggccagaacgtgcgtatgatcggcaatcttgttgagcattccgaccagttcggcgatgtgattggctacgagaaccactccggccagaccttcctgcgcgaaggcgttcagccactcggcaccgtcgatcaggacggccgaggcaacaatggcgaagaccatactgagggcgcgcgcgtgcacaacgtgatcggcacctacatgcacggctcgttgctgcctaaaaaccccgccatcagcgatttccttatcgaaactgccgtgactcgtcgttacggtacgttcgatacgtccgatcagacccccgaacaagccaaggagctcgcccggctcgatcaagtagccaccaacgcgcgcaaggctgctgccgaacgtcctcggtgaattctcggtgagtcctcggtaagtaccaatcagcgaaaaatcagtcgaaatcagtctgagggtctagtacattgccctgttgtttgcgctaggcttggtggtacgagacatggcaccaggccatgtcggacctcgaaggaggggtatcatggctgattttgatcttctgggtgatggcctgcgcaaggtcctgctggcgggcatcggagcccttgccaccggatacgagaagagcagcgagctcgtcgacgaactcgtcaagaagggtgagattacggtcgagcagggcaaggcgctgaacaccgagctcaagcgcaaggtgagcgagacggtggatgacgccaagaaggccgccgccgaagccggcgacaaagctgctgccgcagccgacaccagtgccgccgacaagcccgctgacgagggcaaggccgagtgaccaagcccacacgcgctacgccggaatcagggtcgaccccgctttccagcagggtcgaccctattctgacgcctgcgaaagccgaacgtgaggcggcggcgaaccggtccgtcgacacgtcggacacgctcaagcagaccgttaccaaggcgactccgagcgtatccgacgaaacgctggcactgttcggacgcaggaacgatttcgccacgcgttaccatctgacgcgccgtggcaagatcaaacgactggggcagatcaccagaatcgtcgagcaattcgacgtgctgcacggcctgactccggtcaaaatgcgcctcatgttcgaggcgctcggccccacgttcgtcaaagtgggccagattctgtcgatgcgctccgagattctgccgcaaagcttctgcgacgaactcgccaaactgcgcgccgacgccgacccgatgccgtattccacggtgttggatgtgcttgccgccgaatacgggcgtcccgccgacgaggtgtttgcgcatatcgaccccaagccgttgggctctgcttcactggcgcaagtgcatcgcgccacgctgaaaaccggcgaagatgtggccattaaagtgcagcgcccgggtgtgcgcgaaaccatggcccaggacgtctccatcatgcgctccatagccaaggccgccactaaggtgattcgcacctcacagatcgtggacctgaagggcgtggtcgaggagctgtgggacaccttcgaatcggagactgactttctgattgaggccagcaatctcgccgaattcaagcgtttcgccgcccgattcaaatacatggactgcccgacggtgtacgccgaactgtgcaccgagcatgtggtggtcatggagtacatcgacggcatctccgtctcccacccgggccagctcgtcgatgctggttatgacttgaaggagattggtaccaagctcgtcgacaattacgccacgcagattctcgacgacggcttcttccacgctgacccacatcccggcaatatcatcatccggggcggccagattgtacttatcgacctcggtatgaccggtcggctcgaccagcgcacccgtgcagtcctcaaagaaatgattttcgccgtcgccaaacaggattcgcccgctctggccgaggggctgctgcgatttgccggcaccgaggccgatccggaggactacccagcactgctggctgatctggacgtgatcgtcaaggaattcggcaccgtggatctggccgaactggacattgctgccttcctgaccgcactgacgcagatggccggccgccacaacatcgaggtgcccagtacggtgaccaccgtcggccgcgcgttggttacgctcgaaggcttgctggacgagttcattcctgatgtgaatatgatcgaaattatttccgaccatatcgccacgtcgaaatcgctgaagaacgccaccaaagacgagatcaagtcgctgggcgttgagggacatcaggctttgcatgccacgctcggcaccatgaccgaactcaagaccgtggcccgtatgctgacccgtggtcagttgcgcgtcaacatggaactggtcggctctgaagagccgttccagctgctttcggatatggtgaatcgtctgacgatggccctgattgtggtcggtttgttcgttggctcgtcgattgtctactacgccggcatgaagccgattatcttcggcattccggtcatcggcttcatgggctacgtcgtggccttcgccctcggcgtatggatcgtcatcgacatctacttaaaggggcgcaaaaccaagaagcggtagggtatcgattgatatcagtccagcgggagggtggattcgcgctggataaggtggcagggtacgtagtcgacaccgtgatgcgggttgccgtcgatggcatcgaccaagtatcgtgccgcacgccgtccgatggtttcggtttcgttgtcgatcgacgtcagtgcgggcctcgagctggaggtcagtaccgaccagttatcgtggccgatgacggcgacgtcatccgggatgcgcagtccctgctgcttgagcacgtcaatgcagcctcgggccagttggtcgttttggcagaccactgcatcgaacttgaccccttggtcgagcagcaggcgggtggcggcgcggccccagccttcgtcccatttgccgtaccggattggcccggccggttcgatgcctagctcagccagtgcctcgagcgcgcccttggtgcggtcggtggcagcggtataggtttcgtcgccgccgataatggcgatgtgccggcggccacacgagatgagatggttgatggccatgcgaccggcgtccacgttgtcgcaagtgaccgagcagtctttggggtcggtggaggggccgtagacgtagaccagtggcacgccccagtcatggccaagcgtgggcctggggttggtctcgcactgcacgatgagcagtccgtcgaccttgagggacagcagtttctcgacatgctgacgttccaaggcggcgtcgccacgagcgttggccaacaatactgaggtcgattgggctcgcaactcgttctccgcgccgataagaatcggtgtggagaaacgaccctgcagatcggaggtgaccaggccgatggtgccagtagtgcctcgagccagggattgggcaagcttgttgggagagtagttgagttgcttggcggcatccagtacacgctgcttggtttcttcgctgatacggggtttgttgtgcagtgccttggatgcagtggccgtcgagactccggccaatgccgccacatcctcaagtcgcgctgcccgtccggttgctggctgggtcatcatgcctcgattccttggttcttcagcagtatataacgcattgttttgcgatgaaatacctcatacggtgtggtgcgccattgcatctgggaataattgtagcttcaatgcgaaaactttcgcaaacatctttttttcggcgtggcgtagtcagggaaattgttcaagtgcaaggtaagtgaaagagagcgttacttccatgttcgcttttgtttgatttgctcgacacgccgtaataatcattgatattaagccaattcaagcacgttattcatagtcgaatcacagtctcgaacccgtttgatgtgagaaaaaacgcgaaaatgcgaaagcgcttttgcaaaaacttccatgttcgtttatattgagaaaaggctttcgcagtgttacctgctccgggcaaaggagcgagcagggcgaaaccaaggaggcggaccgtccgccaccgcctctcatagttgagcggatatatagagaaagaagcgaacatggtgtctttcaataaactgacccgtactcttgctggcatcgctgccgccgcgttgatcgttccgctggccgcctgtggtggctccggcaatggtggcactgccaccgccgaaggtatcccggccaagggcaccgacgatggtaccgagatcaccctgtggacccgttcccctctggagcgtcaggccaagaacgtggtcgaggcttacaacaagagccacaagaaccaggtcaagctcgagatcatcccgaacgacgatatggaaggcaaggtcggcggcgcttcgcagaccgactccctgcctgacatcctcgccggcgacgtggtccgtattccgtactgggcttccgagggcatcttcaccgacatcaccaagcaaatcgatggcctggacaacaaggccgacctgcagcagggccacatcgaagccggtactgttgacggcgccgagtacaccctgccgttcatcactgacgtttccgtgatggtctggaacaagaacctgtacaaggaagccggtctggacccggagcagggcccgaagagcatcgaccagttcgtcgagcaggccaagaaggtcgccgccctcaacaaggatggcgttgccggttcctaccttgccggtcagtccggtggtgctctggtcttcgacctcttcccgtccgtgtgggctgacggcgaatccgtcatgaacaaggatggctccgaggccaccctggacaacgactccatgaagggcgtcttggacgcttacaaggagctggccaacaccaccaacggcttgggtgcaggctccaaggaagagaccggcgccacctggaccgctccgttcgcgaacggcaagatcggcgttatgccttacccgaacacctccaccactgctctgttcgatgctgagaaggacggcggcttcgaggtcggcgttgctccgatcccgggcaccaaggaaggcaagacctccacgttcctcggcggcgatgccatgggtatctccaaggactccaagcacgttgctcaggcctggaacttcctctactggctgatgcagtctgacgctcagaaggaagtcttcgctgaccaaggcgacaccgcctccaacatccagaccctgaagaccgcttacaaagacgctgacccacgcatccagaccatcaactccgtgattatcgacggcaacggccagaccccgaagtccccggccttcaacgaagccttcaacgccgctggctccccgtggcagctgctcgtgcagaacgccgtgtggggttccggtgacctcaaggccgacaacaaggccgtcactgacgtcctgtctgcccagtgattcggtggtgatgctcctcaccatcactcatcaaatcacagcaataactgaataataactgaacagattgagccggtccctcccttgtgagggcaggagccggctcaatcacataatcgaacttctatcttcttcttcattccttttcttccttcatcactacataccttatgaatgcggtgtgttggcggggcttcggagtcccccttcctcgaagccctgacatcggattgcattcggattccgtgattaccatttcacagtaatttcccaaaggagagagaaacatgtcgagtgtttccaagagcgccggggcggtgcccgtgcataagtccaaggcgaaggcggcgcagaccaggcgaggtctgctgtacgcacttccggactggctgatgattatcgtcctgttcttcgtgccgattgttctactggtcgtcatggcctgctctcgttggagcctgctgggtggcaaccgcggcgtgaacttcccggacaacttcgtcaaggtgttcgagaacaaattgttctggccctcgatttggttcacgctcgagtacaccgtgatcgtcacgatcttcctgttggtccttggcctgggcatggccatgattgtgcaggagagctcgaagtggaacaacgtgctgcgtacctgcttcctgctgccgtccgcgacgggcctggcgtccgcgtccctgctgttctacgccctgtattccccgcaggtgggccctgtcaccaagattctgagctcgttgggcctgatgcaggagggtggttcggtgctggccaccggccagtcggccctgtgggccacgattatcgtgattgtctggcgattctcgggctactacatgctgctgatgatgatcggtctgcaggccatccccggtgatctgtacgaggcggcccgcatggacggcgccggttcctggcgtatcttccgctccatcaccctgccgctgatgaagccgaccatcgtgatgtgcctggtctactgcgtgaccggctcgatcctcgcgttcgatcagttcttcattctgaccaagggtggtccgaacaactccaccatgaccgtggtgcagctcatctacaacttcgccttcgattccaagaaggatctgggtatggccgcggcgctctcgctgatcgtgctggtggccctggtcatcatcaactccatccagatgcgcggcatgcgcgacaacaccaagtgagaaaggggaggtaacacattatgactaccccattgtggaagcgcgtcatcgctcgaatccttgaggctctgctcgccatcatcttcatcagcccgctggtctgggtcatcatctgctcgttcagcccgcaggccggttcggcccagtccaagggctggggcgtggccaactacctgaccctgttcggttatcaggaaggcctgcccaagtacctgctcaactcggtaatcgtgaccctggtcgcggtcgtgttctccgtggtcgtctgcacgctggccggctactcgttctcccgcttcgactacccgggccgcaacctcggcttcatggtcaccctgtccatcctgatggtgccgtacgcctcgctgttgatcccgctgatggtctggtacaagcagatcggcctgaacgacagcctgctgggcgtgggcctggtcatcaccctgttccagctgcctatgagcacgttcatcatgcgtaacgcatttgacgcgatccccaaggacatggaggaggccgccatggtcgacggctgcaacagcctccaggccttgttcaagatcttggtgccggtggtcaagccttcgatggttacggttggcctgctcgccttcctcgaggcatggaacaacttcatgattccgctgtacttgagctcctcgtccaagtccacgctgccgctggcgatggtgaacatgcgtcagcagaccatgggcgtcatcgattacggtgccaccgaggccggcgtcgtgatcctgctgattccctgcgccatcctgttcctcgcactccagaagtactacgtcaagggctttatggccggagctgtcaagggctgacggctcgcgccgccggcccttggctgggagcccggtgggctcccagcaagctccgtgctgagacgcgacagcgtcgaaaccaatactgagcccggctgaagccggtccttaattgcagggccggaggcggtgtggtcaagggccttaaaaaaaaggacaatcatgaacgttacaatcacttccccgttctggaagcggcgtcgcgaccagatcgtcgaatccgtcatcccctaccagtggggcgtgatgaacgacgagatcgacaccacggtgcccgacgacccagccggcaaccagctggctgacaacaagagccatgcggttgccaacctgaaggttgccgccggcgaattggacgacgagttccatggcatggtcttccaggattccgacgtctacaagtggcttgaggaagccgcctacgtgctggcctaccacccggatcccgagctcaaggcgctgtgcgaccgcacggtcgatctcatcgcccgcgctcagcagccggatggttacctggacaccccttaccagatcaagtccggcgtatgggccgaccgcccgcgcttcagcctgattcagcagagccacgagatgtacgtgatgggtcactacatcgaggccgccgtcgcctaccatcaggtgaccggcaacgagcaggcccttgaagtcgccaaaaagatggccgactgcctggatgccaacttcggccccgaagaaggcaagatccacggcgccgatggtcatcctgagatcgagctcgccctcgccaagctgtatgaagagaccggtgagaagcgttatctgacgctttcccagtacctcatcgacgtgcgcggtcaggatccgcagttctacgccaagcagctcaaggcgctgaacggcgacaacatcttccatgatctcggcttctacaagcccacctacttccaggctgccgagcccgtacgcgaccagcagaccgcggacggccacgccgtgcgcgtcggttacctgtgcaccggtgtggctcacgtgggccgactactcggcgatcaggggctgatcgacactgccaaacgtttctggaagaacatcgtcacccgtcgcatgtatgtcaccggtgcgatcggctccacccatgtgggcgaatcgttcacctacgattacgacctgccgaacgacacgatgtacggcgagacctgcgcttccgtggccatgagcatgttcgcccagcagatgctcgacctcgagcccaagggcgaatacgccgatgtgctggagaaggaactgttcaatggctccatcgccggcatctcgcttgacggcaagcagtactactacgtcaacgcactggagactactcccgacggactggacaacccggatcgtcatcacgtgctctcccaccgtgtcgactggttcggctgtgcatgctgcccggccaacatcgcccgactcatcgcttcagtggaccgctacatctacaccgagcgcgacggcggcaagaccgtgctgagccaccagttcatcgccaacaaggccgattttgcttccggccttacggtcgaacagcgttcggacttcccgtggaacagtcacgtggaatacacggtgagcctgcccgccagcgctgcggacagctcggtccgatttggactgcgcatccccggctggtccttgggctcctacacgctgaccgtgaacggcaagcccgcagtgggttcgctggaagacggcttcgtataccttgtggtcaacgccggcgatacgttggagattgcgctcgagctcgacatgtccgtcaagttcgtgcgcgccaactcccgcgtgcgctccgacgccggccaggtggccgttatgcgcggtccgctggtctactgcgccgaacaggtcgataaccccggtgatctgtggaactatcgcctggccgatggcgtcaccggtgcggatgccgctgtggctttccaggccgacttgctgggtggcgtcgataccgttgatttgccggcagtgcgcgagcacgccgacgaggatgacgcgccgctgtacgtggatgccgacgaaccgcgtgcgggcgaacccgcgacgctgcgcttggtgccgtactactcgtgggccaaccgcgagataggcgagatgcgtgtcttccagcgtcgataaatatcggcgatatgccggcctgcgcgcaactggccggcaaaaaaatacttatgccgccatcgtctgcaataagtcgatgacggcataggccggatgtcagtatcgattggagccgaaaacacatccggggaatgaggtctcctgtgcggggtaatacccgtgcaggagattattttttaattatatgctcccgctgtgagagctgtcggcggagtcgactgagggtggtcataatcggtaccgtgtaagccaccctcagtcttgctttgcgagccagctcccgccagcgggagcctgttggttcctgattcagcgaggctgaatcgttgcgccgtaggtactgcgacacggcgaaacacagcaatgccctaatgcgaaaataaatgcgaaagctgagaaattaccgggtttttgttgtataagatggttgatatcactgagggaaagttgtgaaaccgtattcgctcggttatgatgtggaatcagcttcggtgaattgctccaaccgggatatccatggcggatatcacaccagatttactgaagacactcattccggtgaacccaataaccaataaaggaaactgatggagaacgggctctgcggcccagcatccacagaagaagtcctggtcgcatagacgcgacgtagcctgagcgaagacgcgaaagaccggggcggagaggtccaagcaggaatgcatcaatcaacacgaaagcggtggcttgcgtcaatcggcgcggttgcagcggtcgccacactggccaccggcggtgcagtcaccgcgcaggcagccgatgcgcccgtcatcaagaatgcggatgtggcatatccgtcgttcaaggggtctgatgatccgatgaagacggcggcgaacaacaccacatataaccctgccgccagctatctgcaggagacattcgataacgacgtgaagaacctggccggcaccgacaccgaccatgacttctggatcgataagattctcacccgtactggtgcacagccaactggtaaaggcacgaacgacaagggtgcttactcgtatgaaggctccgacggcaacaactacctgttcacccgtggtcgcgccgcctacatgtacacgcacacgcctaatcggctcggttttgtgggtaacaccgcctactgggatgagaccaacagggatggctttaccgttaccgtaaacgctgacggtgcaaaccagacccttaacgaagacgcctcccagcgcaagcagacgccgagctacttcacctccttgttccagaccggtggcaagagcctcaagatcaaggaagttaagtacatcacctacaacaacgtgatggttgcgaacctcaccgtggaaagcacgcaggaccgcgatgtcacactgaccacggcctcgccgttcgccgccgagggtgctgatggggccaccgaacttactggccgcgtgaacgtcaagaacaacctgacgaccatctatccgcgcttctccgccaacaaccaggacggttccaactggatcgtcagcggtggcaaactcaccagcacgttgagcctcaaggccaacgaaccgcagaccgtcaagattcagctcggcctgatcgccaacgaactgcctgactccaccaaggaatatgaggcccgttacaccggcgaccttaaggatgctgccgcctcctacaaggattccgtgaccacctacaacaagtggtgggtcgataacgctccctacgtggacactccggaagacaacatcgataagaccgtggtctaccgctggtggctgagccgtttcaacatgctcgacgccaacatgcctggcaacaccttccagtacccgacctccatcgagggtgtgctcggctacaacaaccagatcgtgctcacctccggcatgttcatgatggacaccaagtggttccgcaaccccgagtactcctacggcacctggctttccgccggcgataccgccaagaagagcaaggcgggctattactactaccacgacaatccgggcgacccggccaactggaaccatagctacacgcagtacatcacgcgcgccggctgggactcctacaaggtgcacggcggtccgtccaccgtggccgagaagctggccgaccagggtgccgaggacgtgcaaggtctactcgcttccaagagcgagccggacaacaacgacaaccagaacaacaatgacaacagcttgattgactggtcctggtggtcgatgaccggtaacgatgccgacgccgtttccttctctgagccgggtcgctccggccagcgcatggatcgcgccgatggttccgccaatatgtgggccaacgctaacgcggctgctcaggcatacaaggctgctggcgataccgccaacgccgagaagatgcgggccatcgccgacaagatccagaaagaagtcaccactgaactgtgggacaagtccgacaacctgctcaagcacaggtggctgaacgacggtgctttcgccaagtacaaggagatcaataactactacccgtactccgaaggcctgatgcctaccggcaacgaagattacaacaaggctctgcgcctgttcgaggattccaacgagttcccgatcttcccgttcttcaccgccaaccaggcggacaaggccgcgttgaacttccccggttccaacaacttctccatcattaatgcgcagccgctgctgcaggtctactcggccggtattcgcaactacgatgcagccaagaatggctacatcaccaatgagcagttcaagaagctgctgtactgggtggcgttcgcgcactaccagggcggcgataacaaccaccctgatcagaacgagttctggaacgaggacaacaacaacgtcggcgatgtgaacggtgacggcgtgatcaacaacctcgacaagaaccttgacgccgcacagaacggcggcaagatcacctaccgctcctggatccaccacacccagctcggcaccacgaactggacgatggtcgaggacgtagccggtatggtgccgcgcgaggacaacaagattgagctaaacccgatcgaaatccccggttggaactacttcacggtaaacaacctgcgctaccacgatcaggatgtctccatcgtatgggacaaggacggcagccactacggtggtcctgctggctacagcctgtacgtgggcggcaagctcgccttcacctccgacaagctggcgcacctcatctatgacccggctgcgggaacggtcgaggtcaaggacgattccggtgcccaggttaccgtcggcgccgaagccgtcaagaacgtgaaggccgccaatcaggttaccttcaatgccgatcagcgcgtgaccgacctgttcgccaagtccggcaccaacgtcgactccgcctccaagtccaccacgaacgtggccaaggacgcggacgtgaccggtaccacctacgccgagaaggacaccaactacccggccaagaacgcggtggacggcaagaccgtgatggaatcgttctggggtaccaagggctccgggaacaagaccgacacgctcaatatcaagttcaaggacggcaagcagaagatcgacgacatccgcttgtacttctaccagagctcgtccagccagaccatctccggctatgccgagcccgccaactacaagttggagtaccagaaggatgacggcacatgggccccgattgcggatcaggtgcgcaccccgaactacgcgggcgcgaactacaaccgtatccagttcactccggtggagaccacgaccatccgcgtcaccttcacgccgcaggccggcatggccgtcggtgtcaaggagatcgaagcctacaacaccggtatcaaggctgacggcacttctgagaaccagactccgcaggtggatgcttacgtgtcttccagcacctcatccggtgccaagctcgtcggtacggtgaaggatgacggtctgcccgcagaaggcgacgtcaccaccacatggtcccaggtctccggtccggaaggcggtgctgcgaagttcgtggacgcctccgctgccagcaccaccgtcaccttcaacaaggagggtgactacgtcctgaagctcaccgcttccgatggcgagaaggaaggctccaaggaaatcaccgttcacggcatcccctctgacggtaccgtgaacgtagccccgcagtcgagcgcctctgccagctacaccaacggctaccagccgaaggacaacgccaagaaggtcatcgacggtcaggtggtatacgccaacacgccgaacgagacctggaacaactggggcgacaacaccggtgtggagccgtggctgcaactgaagtgggccggcaaggtgccgctgaagaaggccaaggtcttcttctggaccgatggcggtggcgtgccgatggtctcatcttggaagcttcagtacgctgacgctgacggtaactggcaggatgtgaaactggctgacggccagtcctacacggtcaaccggaacgaaggcaacgaagtgaagttcgccgacaccgtcgaaaccaacaagctgcgcgtggtcttcccgaagggcgccatcgtgggtgcttccgagttcgaggcgtacgccatcgagccggtgagcgtggacgaagtcaaccgactggtgcagaccggttccaaggccgatgatctgaagctgccctccaccgtgagcgccgtatacaccgacggttctcgccgtgacctcgccgtcacgtggggtaaggtgaccgacgctcagctggccgccgatgccgtattcgatgtcaagggcaccgtcgccggtgcgctgaacggtacggttgcacacatcgcggctcgttccgataccgcatcgcagaccgtgggtaatgcgcagccggttgagcagaccgtctaccagaacgccaagtccatcgacctgcccgccacggttccggtgaagttcccgaacggatacaacgacgaccgcaaggtcacgtggaaggatgccgacatcaaggccatcgacctgaccaaggttggtgactacgaggtggctggtaccgtcgacgacggttcatcttccgcagctgccaagctcactgtccacgtggttgccgacccgaacggttcctccactccggagcctgagcctgagccgttggtcggttggattgaaggcaaggcgaccaagaccaccatttcgcctgattccgaggcaacctggtcaccggccgaaggcaagctcaacgacggcgtagtcgtcgatgatacttggccgaccacggatgatcagaacgtcaacgacaaggtctggggttcttggggcaaggcaaaggacggcatgtacgcccagtacgacttcggtcagtccgtgaccgttgaccagagccgcgcccagttctgggccaacttcgctgagactgacgattcgaagggtggtctggaagtcccggacgcttggaagattcagtacctcgccgaggatggttcttggaaggacgtcgagcccaccgaggattacaccgtcgtgcgtaattcgccggcttctcgtgcggataccgatgccaagggttggagcgctgtgaccttcaagccggtcaccaccaagtcgctgcgactcgtgctcactccgcacaccggcagcagcaccttcggggccgccgtggccgagtggggcgtgcatggtattgacggcaccgagcctgaacctaccccggtcgacaagaccgcgctcaagtcggctcttgacacagccaacggcctcgatgcaaaccgctacaccgccgcttcatgggctgagttccagcaaagcattgacgctgcccaggctgtgtacgacgatgtcaatgccaccgaagaacaggtcgccgagcaggtgaccaagctcgaggacggccagaaggtgctcgttgcgctcgccaccgacgtggagaagtccacgttgcaggcggccatcgacacggccaaggccgaggccgcttccggcaagtacacggataagagtgtcgaggccttgaacaaggccatcgaggctgcggaaggtgtgctcaagggcgatgagtccggtgaggtcactcaggccgccgtccaggaagcgtccgcttcgctgaacaaggccgtcaaggccttggaagagaagcccgccgtcgaaacggtgaagaaggagtctctcaaggcttccatcgagcaggccaagaaggctgacaagtcgaagtacaccgaggaggcatggcaggctctgcagagccagattgccgccgctcagaaggtgtacgacgacaaggatgccaagcaggccgatgtcgatgccgcacaggatgcccttgacaaggcattttgggccaccaaggttgagcagaagcccggctcccagcagcctggtgtgaccgacactgataaggatgataaggacaacaagggtgatcgtgtgcctccgactggtgccgcggtttccgtagttgctgcggctgccgtgctgctcaccgccgcaggcgtgaccatcctgaagcgtcgccagtccggcgaccacggttcggctcgccactcggcctgacccgcaacggagtcattctgccgagtgagccccctcacagagggggctctagccttttccttctacccatcattactcttttcactcactcaatgaggagcactatgagtttccatgtatccgcgcaatcggttcgcgcggtggccggtggactcgtcgccgcagcgacattgctgtcaggccttgcccttgcgccgaccgcaatggccgccgattcagccaccgctgacaacgcgcccagcgttgccggtcacgcgtataacgaactgccgtataacaatcctgatgtcaccgtcacccaaatcgacaatagcgcactgcccagctacatgcgcaaccccatcgggcagaacgagggtattgacaccccgaacgatctttcgcagaactactactctgcagatgcatccgcgctgagctatgacggcaaactcttcgtcttcaccggtcacgatgaggcttcgcccgactacggctccttcaacatgaaggactggggcgtatacgtcaccgatgaagacggcctgaatcaaggcaaatggacacattacaagaccatcgccaaggcagacctgttcagctgggccaccggcgatggcgcgtacgccggccaagtcgtagccgacgataacggcaccccgagcgacacttccgatgattggttctactactacgtgccggtgaaggacaaggcttctgaggcggctggacaggacccgttcgccatcggcgtggccaagtcgaagagtccgctcggcccgtggaaggatgccatcggcaagccgctgctcaccacatcgcaaacccagattgaaaccatcgatccggcattctttgtggacgaggatggcaccggatatttgcactttggtacgttcggcactcagctcgccatcaagatgaagaaggacgccacaaccggccgcacctcatacaccgaggtggaaaccaaggctgatggcaccacgccgaacctccacaccatgaaggacgcggacagcaacgcgaacggcccgaagggattcttcgaggcggcgtgggtgttccgtaagggcgatacctattacaacgtgtacgacggcggtaagcccggttcgggcacggccacctgcgtggaatcgaactatcaagcttgcatccagtactccacttccgacagcccgctcggcccatggaagtaccaaggcgtaatcgtgccttctggctcggccaccacgatgcacccctcggtgctccagttcggcgacaaatggtatgtgacctatcacaccggcgacaaggaaggcggcaccgatttccgccgtgccgtgtgcattgatgaagtcgattggaccgccgacggccagatggtttccaccgcccatccaaccaaggccgagaaaacgcagccctccaccaacgtggctccgtacgcaaaggtgagcgccacgttcactgaaacgcctgcttggaagggttcggtgaacgacggccgtgtgttgcaaaccgctgtggtcccgccgaatcactggaccaactaccgttctatcccgcaatcgcagtccggcgattctctggtctaccaatgggatggcactgtgcgcgtcaactcgtctaaggtttggttcgacgtggattccaacgctctgcgcgcgcccgcctcgtggaagattcagtacttggacgcggacggcacatggaaggatgtcaccaacccgagtgcctatacaacgaccacaggcaaggccaaccccaacgccgtcaccttcgatgcggtgaccactactgccttaaagctcgacatgaccggtcaagctgtggatggcggctatgcctccgtggccgttgctgaatgggaagtcggctccgactccagcgaatcgccggcaatcactgcgccgaagagcgtgaccaccgccaccggtactgcgcctactctgccggccacagtggatgtgaagtacgggaacccaaccgttgcctccccagtaatttggcgtccagttgatgctttctcgtatgccaaggtcggttcgtttacggcctacggcgtggtcgccggcgtgcccggtgaggcaagcgagcagggcaatgtgtcggtaaatgtcaccgtgcaggacggctaccagcctgccgctgataccacgaagccgactgtaaccgttgccgttactgctaacgcaggcaatagcgagtggctcgccaccgctccgttcgccaccgtgcaggccacggacgacaccgcacctatcgccaagctggagatttccgctgatcaaggcaagagctggaccaccatcgccgcgaatgcaaacgcggccattgccacgctttcccagcagggcgatgtcgaagtgtgggctcgcgccaccgatcaggccggcaacgtttccgacgtggccaaggccggcggcaaggtggactccgccgcgccaaccgtgaccgccgccgccgataaggaggagcgcacgctgaccttgaccgctgatgacggcaccggttccggtgtcgcatcaattgaataccgcattggcacagacggtcaatgggccacgtacagcaagccgattgctgcaccgagcgcgtcgcgcgccaccgtgtactaccgcgccaccgataaggccggcaacgtgtccgcttcggcgaaaaccgacattccatccgacacttccgtgccgctgaccggctacattgagggcgatgccaccgccaccgatgtggacggcaaggcatccggctgggtcaagggtgccgccgcgttgaacgacggcaagatcattcccgatatcaccattgccaacgaggatgtctggggcacttggcccaacaccggtgagatgcgcctcgactacgagtgggaccgtgaagtgactatcgactctagccgcgtgcaattcacctcggatgatggcggattgggtattccggcatcgtgggaattgcagtactgggacgccttggcgaacaacggtgccggcaacttcgtggatatttccgacgccacctacactgtgaccgccaattcaccgtctgctggctgggccaccggcgatgccaaggggtggtctgatggcacgtggaacactccggtcaagactaccaagttgcgtatggttatcacgtccggctcggcttctccggctgttgccgaatggcaggttcatgccattgacgacagtacgcctgagccgcctgagcccacaccgatcgacaagaccgagctcaagcaggcgctcgctgactcgcctaaggctgacgatgcctccaagtacaccgagacttcatgggcggagtacgcggcggtattggattcggcgcagcaggtgtataaggctgaggatgcccccgaagctgcggtggtggatgccgcaacccagctgaagcaggcagcgaagaagctggtgcttgtagctacggtgcaagatcgtgccgcgctgagcgctcagctcgatgccgctgctgccgtggatcgcacaaagtggactgatgaatcgctggccgtgcttgattcggcagtcgctacggcgaatgcgctgacgagtgatggtcaggccgcccagtctgacgtacaggctgcgactgaggcaatcagcgatgccatcgcgggtctggttgagaagagcaccacgaagcctggccagggtggcgataagcccggttccggcacggacaagcccaaccaaggcaacgattccaaccagaacaagggtgatgcagactccggcaagcacaagaagatacctgacaccggtgcagccgtgcttggtgttggcatcctcgccgtggtacttgctgttgcgggtgtaatcatcctcaagcgccgcaagtccggtacctgctagtcccactcgctcggcctagcatcaccaagcccccgcgcatgaacagcgggggcttcacttttgttcaataacaagcattatgtgcgcgtatgagactacgatggtggggaatctacgaacaggggcagcaatgacggcatacatggaccataaggatctcgccaacgaagttatcgatcaggcgcgcgcacaagagattactgatggtgtgcatcgcgtgcttgaccggattgcctcagcggagtccgcagccgggcgtgctgccggttcggtccaattgctggctgccaccaagacgcgcgatgtcggcgagattctggcggctatcgatgctggtattcgcgtgattggtgagaatcgtccacaggagattactgtcaaggctgacggtctggcaaaacgactgggggagcgtggttattcgctaggcgtgattgatgccgctgaggctgacacggccaatgccgcagctgcaacgcatattcctttccatctcatcggccaattgcaagccaataaaatcggcaaggtgctgccggtagtggacaccatcgaatccgtggattccatcgaactggcggaaaagatcgcccgccgtgccaccatgcgcggcatcacggtcggcgtgttgctggaggtgaacgaatccggcgaggaatcgaagtccggctgcgcacccagccacgccatcgacttggcccagcgcatcggtgcgatgggcggactgcgcttgcagggattgatgactattggtgcccatgtggatgatgagcgcacgattcgtgcgggcttcgcgcatctgcgccgcactcgtgaccagattcttgcctccggtgccgaaggcacggccgactgcaccgaactgtcaatgggcatgacccatgacatggcctacgccatcgaagaaggctccaccatcgtgcgcgtcggcaccgccatcttcggcgagcgcgccttcatctgattggagctatacgaaaaaacaccgcttgatcaatagccaagcggcgttttttcgtaaggattttcggcgtatcaatcacgcatagatattgcgcggacgcatgtcttcgggcaggccgtcgagcagaatcgccacagaaccttcctcgaacacggagcgaatacccgcggccagcagcggtgcgcaagacagtacggtcatattcggcaggcgcttctcttcgggaatcggcacggtgtccataaacacgatttcatgcgcgccgcagtgagacaggcgctccacggccgggccggagagcaggccatgggtggcgaccagcgtcaccgacttggcgccggattcgttcagggtgcgcacggcttcgcagatagtaccggcggtatcgaccatgtcgtcgatgaccacgcagtcgcggccgtcgacatcgccgataatgccatgtgcctcggcatggttcggacgagtaatatcacgctgtttgtggatgaatgccagcggcagattgcctagcttggcggcccactgttcggacaccttgatacggccggcatccggggacacgatggtggtgttgcccagatcaagggtggaacgcacgtaatcgagcagcaccggcatggcggttagatgatcgaccggaccatcgaagaaaccctgctcctgagcggcgtgcagatcgaccgtcataatgcggtctgcaccggcggcgtggaacagatcgaaaatcagacgggcggtgatgggctcacgaccgcggtgcttcttatcctggcgcgagtagccgaggaagggcgccaccacggtaatcgacttggcggaggcgcgcttcaaagcgtcgatcatgatgagctgttccatgatccacttgttgatatcgcccgaatgacactgcagcacgaacacgtccgcaccacgcaccggttcggtgaaacgcacgtacatctcgccattggcaaagtcataggacgtggtttcgaggatttcggttcccaaacattcggccaccttctcagctagctcggggtaggcgcggcccgtgaccaatacgagtcgtttatccggagtgccttcaagaatcgccgacatgcgttcgcatcctttgtttgagtcgctgtgtgatttacgccttaaccagtgtacaagcaccccgccgcagcgaacgccacggcggggtgcttatttcgtaagagtgttgagattgccgaaatcactcggagaactcgacactgaccttattgtctttgatggtgaagttgccgttgacctccttgccttcaagcgtgtacgtcagctgggcgctcacggtgccatcggcattattggaggtctgcgagatgcgcgcgttggtgatgcgcgtgttctcgcccgaggatgccttgctggtcagcagtgcgcgctggttcgtattcacgtgaggatcggcgatggtgttggccttgtcgtagttgccggaggagatggcggccacatagctgttcgcaacgctcttcgcgctgaacacggcggaagacagcacgccatacacgataccgaacagcacgaggaagccggccacggcaccaacgatgatgaagattttcttctgttgctcattcatggtggtggaggtcgcgccaggtgcggctaccggtgccgctccgggagtgatgggagccgcgggctgcgtgggcttggccaaaacggtgggcatcgcgaaaccggcaagaatatgggcataccctgtcccgcctcatatatagactgtccaagttgcccgaagaggcggtgccggtttggtgctgcgtcatgggctaacacgcatacacactcctgccacggaacgtccgtggccgaatagtccgaaggaggtgggtgatgtctgcgcacaagtacgaactgatgttcatcgccgatcctgagctggatgagcgcggtctgaagaagctgaccgagcagtatctggaactcgtcaccaaggaaggcggctctttcgatgagcccgattactggggccgtcgcaagctcgcctatgagattgccggtaagaccgaaggcaactacgtcgtggtgaagtacaccgccgagcccgctaccagcgatgagcttgaccgtgttctgaacctcaacgaatccgtgatccgtacgaagattcttcgtaagggctgaatcaagcgtttagtcagctgaacagctggtattcaaggtaagtaagaaggaccgttatggcaggtgaaaccgtcatcaccatcgtgggcaacctcactgcggaccccgagctgcgcactattggcagcggtgcgaccgtggcgagcttcacgattgcttccaccccgcgaacctggaatcgtcagaccaaccagttcgaggatggtcaggcgctgttcatgaggtgctccgcttggcgtgatctggccgaccactgcgcccagtccctgaagaagggcatgcgcgtgattgccaccggtcgcctccagcagcgttcctatcaggcacaggatggttcccagcgaaccgtcgtggagatgcagctcgatgagatcgggccctccctgcgctacgccaccgcacaggtgactcgccagtcgtccggtcagggcggcttccagggtcgttccggtggtttccagggtggtcagcagtccaatcagggctatggcaaccagggtggccaaggtggttatgccggtggccagggcggttacaacggtggctatcagggtggtggcgctggatactcccagcagtctgccgctcccgccaacccgtccgctcctgcggtcgacccgtggagtaatgccggtgcatctgatgccggtagcttctccacgttcggcgcttcctccgatttcggcggcgacgattccgacccggagttctgatcagtacttgcctccccgctgccagcagcaatcaatatcaagatttataaggagaacatcatgtcacgtaagaggccgcaaccgccggtcaagccgttcaagaagaagccgaacccgctgaaggccgccaaggtcaccgagatcgattacaaggacgttgcgctgctgcgtaagttcatttccgatcgcggcaagatccgttcccgtcgtatcaccggcgtgaccgtgcaggagcagcgtgagctgtccaaggcgatcaagaacgcccgcgagatggccctgctgccgtacgccacctcgggtcgctgagttagggaggctttgaacaatggctgaaaccaaggttattctcaccaagaccgtgtccaacctgggccattccggtgacgttgtcgacgtgaagtccggctacgcccgcaactacctgttcccgcagggcctcgctttcgcgtggaccaagggcgctgaggctcagatcgtcgctatgaagcgcgctcgtctggccaaggccgtcgctacccgcgaggacgccgtcgccgctaaggccgccatcgagggcactaccgtcgagatcgccgccaaggtgtccgagtccggcaagctgttcggtggtatctccaacgaggccatcgccgtcgctctgtccgacaaggccgcggtgaacccgaaggccatcgaggtcgagaccatcaagaccaccggcgatttccccgccaaggtggccctccacccggagatcaccgcttccttcttcgtgaaggtcgtggccgagtgagtcattccggcctagtgctggaatcacacagaccaagagtctgagcttaagcatcatcccccgtgcggtttgcgccgcatgggggatttttgtattagcaaaaacgccggaaataggcgcgacacgccgagagttgcattcgcttcaaatctgagtatatttatcacctgttgcaaggaatacttcaacatctaaccaagcccctgtagctcagttggttagagcagctgactcttaatcagcgtgtccagggttcgaatccctgcgggggcacagacaaccggaatcgaaagattccggttttttgttttttccagtatcagtccgtagctggtgcggaaaggccgtctccgcgcgtgacggccggacgtgtaaggagcaacgtcatgcctcagatattcacgttcaccgtatccgaccccgaaggcatgcacgcccgcccggctggccggttggttgccaaagcgcaggaatatgaatcgagcatcaccgttgcctacggtggaaaatccgtggatgccaagcgtatcttcggtgttatgggacttgatgttcaacaaggtgacgaggttacggttcgggtgcagggcaacgatgaagctgtcgctgctgcagagttcgagcgattcctcaaggagcacctgtaatgagaacgatacagggcgtcagcgtatccgctggcattgctatcggcacggtccgcgtgctcgccgccgtagattatgccgtagaacgccgcttaatcgacgacccgcaggccgagatggatcgattccgcgcggcccgtgacacggccgtcgctcagctcaagcaactgcgtgacaacgtcgccgctgagttcggcgaaaacaaggccgaactgttcgacgcccatcggcttatgctccaggacccggactatgcggaatgcgtcgaaggtttgattgcgcaagacaaggtgaacgccgaattcgcggtgaagagcgccgccgaacagttcgccgccatgttcgctgcgatggatagctcgaccatgcaggctcgagccgctgatgtcaaggatgtttctcgccgcgtgatgaacgtgctgcaaggcaaacgcgatagcacggcgcaggatggcagtgtacaaggcgatgctgtgcagaacggtattgtgcagaacgggatcgcgcagaacggcgaaagccacatcatcttcgccgaagatcttgctcccagcgataccgcgcagctcgaccgcgctaaggttttgggcctcgtgaccgccaagggctcagcgaactcgcacaccgcgattctggcgcgcacgatgggcctgcccgccatcacaggtatcggcgacgcctttgacccggccgatgatggtcacgttgccgtaatcgacggcaccagcggtgcggtattcgtcgacccggacgaggccacgctgaccgaataccggcgcaggaaggccgaggctgaggagcacctaagcctcctgcggaagctcaagggcaagcccaccgaaaccaagtccggtcagcgggtccacctgtacgccaacatcagccgtccctctgacgcagccgccgtgctggccaacgatgctgagggcatcggcttgttccgcagtgagttcctgtatctggaacgcgaggactggccgaccgaggaatttcagttcgatgcatacggacaagtcgcacaggagatgggcgaccgtccggtcatcatccgtacgctcgacatcggcgcggacaaacaggtcgactacttcaatctgagccacgaggataatcccgcgcttggttaccgggcaatccgcatctgcctgacccgcccggagattttcaaagtccagttacgcgcattattgcgcgcctcagcatacggcaacatcgccattatgctgcccatgatcacctctgtgcaggaggtacgcgacgccaagcggattcttgaagaagccaaaagcgagctgcgcggcgagcgcatcgacttcaacgagagtatccagatcggcgttatgattgagacgcctgcgtcggtcattatggccgacgagctggccgccgaagtcgatttcttctccatcggcaccaacgacctgacccagtacacgctggcctgtgaccgtcagaacccgagtctcgaacgctttgccgacccgcattcaccagctgtgctgcgcatgatccagatgactatcgaggctgcccatcgtcatggcatctggtgcggcatctgcggcgagcttggcgcagacttgagcctgaccgatacgttcctgcgcctaggaatcgacgaactgtccgtctcgcccaccagcgtcctgcctctgcgcaacgtcattcgcaaccactgagattcaaggtcgcttcggctgattccgatggctttttgggcattgcattcggctggacattcgacatcgcatcttgccggcatttcgtcgtggggcaaagtgtacaatcaccacgtttgctttcgcgcccagcgtaaatcgcgtcgccggctccgcgaacggatttccagtcacacagaatgccgtgaacagtcagccatgcctgttgcgcggcgaagagaaaagaagaagcagtggattatcctctctttaccaagctggccgccgagttcttcggcaccgccattctgatgatcttcggcaacggctccgtggccaacgttgagctcaagaacaccaagggccaccacgccggctggctgaacatcgccatgggctacggcttcggcgtcatgttcccggtgctcatgttcggtagcgtctccggcgcgcacatcaacccggccatgaccatcgcccaggccgtcaacggcctgttcccgtggagcgacgtgctgccgtacatcgtcgcccagctgctcggcgccctgctcggccagctcatcgtctacatcacttactacccgcactacaaggagaccgaggacgccgaggcgattctgggcaccttctgcaccactgacgcggacaaccagaaggccaactacttcctcaacgagatgttcggcaccctggtgctcgtcttcggcgccctgtgctgcctgtccctggcttggggcaagcaggattacgccgccgcctccatcgtcgtcggcttcattgtgtggggcctcgtgacctccatgggtggcccgaccggccctggcctgaacccggcccgcgacctcatgccgcgtctgctgcacgccatcctgccgatcccgcacaagggctcctcccgctggggcgaggcctggatcccggttgtggccccgattgtcggcgccattatcggcgcttggctgttcgtgttcttcttcgccaactgattcgttgattgattcatatatgcaaatggcctccgctcgttttgggcggaggccattgtcgttgaatcaggtaaacgcagagactactgctccaggaacacctgcggggccttcatgaagttcgtggcacagtgttcgccgcagaagtaataggacttgccctcatactcgcgcgtgatcgcatcggcgttcacagccacggtcatgccgcacaccgggtcggtggcggtttcgccgtccgcgggggcggtgtggtgcatgtgcattcccgtatccatagtgttctccttgttggttggattattggattggtcagatacgtgattggtttgattcagcgtggtgcgatcatcgatgatgacggtcggctcgtgaggcgcgttggatgtggcggagccggtgatgttggcggcgttggctgattcggccgatccggctgattcgacatccgccatgctgctgcccgaaccggcgggaccatcggcaacgcccacgttgatgttcgctccatgcagccggttcgcgttcagcaccaggcacactgagctcaacgccatcgccagacccgcgatcatcgggctcaacagccagccggtgaacgggtagagtacgccggcggccaccggaatgccgatgacgttgtagccgaacgcccaccccagattctcgcggatgttgcgcatcgtggcattggacaggttgatggtcttgatgacgccgcgcaagtcgccgctcatcaaggtcacgtccgccgactgcatcgccacgtccgtgccggtgccgatggcgatgccgagatccgcctgggccagcgcgggggcgtcgttgatgccgtcgcccaccatcgcaatcagagtgcgggattgcgcggccgtgcgggaggtgccgtacgcggatttggcggtggcctcgtcgcgttcgcgctgcagtttggcgatccagtaggccttgccgtccggcttgacctcgcagatcaccgtatcgatgccgacttcgcgggcgatgcgcccggctacctcggccttgtcgcccgacagcatcaccgtgcggatgccgcgtgcgcgcaacgccgcgatggcctcgcgcgagccttccttgaccgtgtcctgctcgtagctcggcttgtcccagtcggcggccgcgtccaccacgccgcgcgtgatggtgccggtcttgtcgaacaccacggtgccgatgcgacgcgcctgttccagcgccttggcactggtgaccagcacgccgttggtggcgcccaagcccagcgagaccgtcaccgacagcggcgtggccagtcccagcgcgcacgggcaggcgatgatcagcacactgaccgcggtgaccagcgcgtgcgccagttgcggcgccgggcccagtgacctccagatggcgaacgtccagatggcgatgatcatcaccgccggtacgaaataccgggcgatcttatcggccagttgctgcaccggtgccttggtcgcctgggcgcgggccaccatcgccgcgatctgcgagagtaccgtgtccgcgccgacttgggtggcgcgcatcacgcagtcgcccttgagcagcacggtggccccggtcaccgggtcgcctgcggttttggagaccggcttggattcgccggtgatcatcgattcgtcgatacgcgcctcgccggccacgatcacgccgtccgtgggcacgcgctcgccgttcttgacgatcagcaggtcgccggtgacgatggcgtcgatgtcggtgtccgtgaaatgcgccggattacgccattcgatgccgtccacattgtctgcggaagtggcgttgagcttgtgcgcggtgcgcgggcgcagtctgataagcgactgcaccgccttgccggtgccttcgcgggccttggcctccagcaggcggccgaccagcaccagggtgatgaccacgccgaccgattcgaaatacggctcgcgcgagccctccgggaacacccacggggcgatgcaggtcaccagcgaatacaggtaggcggccgaagtgcccagcgagaccagcgagttcatgtcgggggagcggtgcgccagcgcggggaagccgaccgtgtggatcggacgcccgcagtagaacatcaccggcgtgatgagaatggcctgcagccacgggttcaccatccaatgcggcaccagcgcgggattggccatatgcagcatggtgacggcgaataccggcaacgtcagtaccgcgcccacaatcaccagcttcgtcagcgccttgatctcattggcgcgttcagccgcctctcgccgctcggcctccgccgcatccacaaccggagctccaacccgcaagtctgagggagagaccccctcggcttcggccgagccgtcagcacgcgggcgaagcccgtccttatccgcaccgtccttactctcctctccctcaaccctcaacaacccatgcaccatattcatgccgcatgcaaacggatattcgcccgccggcaacgccggtagttccacgtcggtggtggcgttgcccggcagcatggcgtcaagccccagatccgcgaacaccacatgcgaagtgcattcgccggtctcctgtcgatcgaaagtcagcgtgatcggcgtacccgtgcgcatgctgatcacggcgggggagtacccgcccttgacggtgattgttgcggattggcgttcgccggaggcgtccatggccccggccgtggctttctgcgttccgaagaagaaccgcagtaccagccatgtcaatgcggccgccgctatcagcgccgtggcggccgagaagatgctgagctccataaccgttccttccccttgtttgttgtactgaacaacagtgtataccctatacccctagagggtatataatggggtgtgttcagctgacggataagtatcagggggtttgcgatgcatggttatgacgaagacaaggccaaggtcatcgcacgattgcgccgtatcgaaggacaggtgcgtgccatcacgcagatggtggaggatgacaaatactgcatcgatatcctgacgcagatttcggcgtcgaattcggcgctgaaatccgtggcgttattgctgctggacgatcatctcaaccattgcgtgcggcaggcgtcgattcagggcggcgaggtggccgatgaaaaacttgcggaggcttccgcggccattgcgcgtctcgtcaaatcgtgacgagttttaccgtcattcaccatcgatgacatactgggtaccatgtttgagcaaataggaaccgtgattatcgtcatcgtcgtgctagtggttggtgcagggcttggcctcttcgccggcttcgtgctaggccgtcataagggtcaggagatggctcgaggcgtcaaaagcgaggagctggaagaggccaagacctcgctggagaatgcgcgattcgagaacgctgagctcagtgctcgcaatgctgccgcacaggctcagattgaaggcgtgaaccagcaattggctttcgccaagtcacaacttgcccaggcgcagcaggctgagcagattcgcattcagcaggaacgtgagcgtgcagctgcggaggcagaacggaagcgtcaggcggatgctcaggccgccgaggccaagcgtgctgaacaggaagcacgtttgaaagaacagagcaaggtgctcgaggcgcttgcgccagtggccaagaatcttgataccttgcagaacaaggtcacgcagatcgaagagggccgcaagagggaaatgggcgcattgggagcccaactcaaggggctcaacgatcagcaggcccgtttggacaaggaaaccagttccttgtccgccgcgttgcgcaacaacaaggtgcgtggcgcgtggggcgaggcccagctcaagaacattgtcgagtccgccggattgctggaacatgtcgatttcgacacccaagtggtggtcacggatgccgatgggcgtacgttgcgcccggatatgatcgtgcatctgccgggaggcaagaccattccgattgatgccaaagtgccttatgccgattaccagcgtgcctgcgaaatcccggacaccgccagccccgaggatattgcccgccgcgatgatttgctgcggtcccatgccaaggcgttgcgcgagcatgtacgtgctctcggcgaaaaggcctattggaatgcctttgatgtagcacctgattttgtggtggccttcatccccaatgaggcactactgcaggccgcgctcgaagccgatcccacactgatggatgatgcgttctctcgcaaagtggcgctcacctcgccggtcacgctctgggccgtgctgaaatccgtggcctatgcctggcagcagcagtcgctcaccgatgacgccaagcagctgttcgatttgtcccgagaactgtacgaacggttctccacgctgggtgattatgccatcaaattgggcacccagattactaagacggtcagcgcctacaacaagttcgcgtccagtttggaacgccgtgtgttgcccaccgctcgcaagctgcaaaaaatcgaaccgaccaagatcatcgaggaagtaccgatcatcgaatcagataaaggcaatgtgagcgaactgtccgcccctgaagtggtgccggccgatgaaggtgatactcatctgactgcctcaggcgatagtctggagtcatgactgaatctggattccgccccactggtaccccggaccttgccgtcgcgaagagccataatgactttgccatgctggagccgcgtgaacagctagccaccttgctgaaggagcatgtggtgggccgtccgttctccgaacttgccgcggtgactttcgaccaccgtgccgccactgtcatgggccatgtactgattgacgctttggaagatgcgggctattcgattgatgacttcgatgctgttggtgccttgaccgcagcatctgtgcccatggtgtctgccatgatccaggccgccgcctctcgtggcgaggacctagatggattcgtgatggacttcgtctacccgtccatcaagggcccctccatcgaaggccgccgtgtggtgctgttggatgcttggctgtccgaaaagtcgtacgtgcagacaagctcgctggtcaccctgcgcaacggcaatgagctgagcctcgactttggcatagtggagcagctgggtgccaaggtcgtggccatcgcctcgctggtcggtggcggtgccaaagacatcaatgtggtcaacccctccaccggcgacgagcaaacgctccccttcatccaggtcttcgacgaatccgaactgcggtaaatccacctttgacgtccctcgcataaagtcagccgggctgagcagcgaagctgactaagaggaaccggtgaatagcgttatcgaggagaaagattgcacgcacccaaccagatttctttggctgccaaggcttcaggtgaaccggaattccgtgaaatcggccttgggccgtggtctgagacccatcccggtgagcctcgtcccgatgatccgacttcttcgaattatgacggtcgtttcgactcggtgctgttgaacgacggagaccgccgcaacgtattggaccgttaccgctactggaccgttgctgccattaaggccgatcttgacgctcgagggcgtcacgacttcgaagttgcggtggaaaactggacccacgattttaacatcggttccatggtccgcaccgctaatgccttccaggccaagcgcgtacacattgtcggtccacataagtggaatcgcaagggcgcgttgatgaccgaactgtaccagcacgtcgaacaccacccctccatcgccgaactggtggaaagctggcatcatcgcatcgccggtgaaatcgcctatgaacgagccaaggccggtgccgccgccatccatgcgcatgatgtggctgtggatggagacaacaagcaccttcatgagctgctggccgaaatcgatgcttgtgatgcacgcatcaaggagcttcaagccgcccgcgtcatcgccctcgacattattcccggcgcagtgccgatggaagcctatgccttccccaagcggtgcctgctgctcttcggtgcagaaggccccggattgagcgagaaggccctcgcattggccgacgatgtggtctacatctctcaattcggttccgtgcgctccattaatgcaggcgctgcggcggccgtggccatgcacgcatggattgcccaacacgccgtatcaggcgtgtagccatgcgccgacaatcctgccgcatggatcggcggtctcatcgtcaccagaaaagcggatatcaaataatgacccgagtgcctgccctgctgaaatggtctcaaagggtaggaaaatgcggtttcccgacaactgcgtgtcacatacggctcatatagttatggccatgccaacattttcacgcgaagaaatcgtgcatttgggcgatctggcccgaatcgcgctcaccgatgaggaaatcacccgtctgcagggcgaactgaacgtcatcgcagactccatcaacaaggtccaggaagtcgcctccgacgatgtgccgccgaccgccaacccggttccgctggaagcctacctgcgcccggacgtcgccgaaaccccgctcacgcaggaagaggcgctcgccggtggcccgaagaccgaggccggcatgttcgtggcaccgcgaatcctgggaagcgaggagtaatcgatgagcaacgaaaccgcaactctcgtcaaactgtctgctgccgagcaggccgctgccgtcaagaagggcgacgtcacctctcgcgagctcgtcgaagcccacctcaaggtgatcgaggctgccgagccgtccatcaaggccttcctgaaggtttccggcgatgtggctctcgagcaggccgacgccttcgacgccaagtccgccgaagacaaggccgccctgcctgagctggctggtgtgccgatcgccatcaaggacatgatcgtcaccaagggcatcgaaaccaccgccgcctccaagatcctcgaaggctgggtgccgccgtacgacgccaccgtcatcgaaaagctcaaggccgccggcatgccgattctcggcaagaccaacctcgacgaattcgcccagggctcctccaccgagcactccgcctaccagaccacccacaacccgtgggataccgagcgcgtgcccggcggttccggtggtggctccgcctccgcagtcgccgcattcgaggcaccgatcgccctcggcaccgacactggtggctcgattcgccagcccggcgccctgaccggcaccgtgggcgtcaaacccacctacggcggcgtctcccgtttcggagccatcgccatggcctcctcgctcgaccagatcggcccggtctcccgcaccgtgctcgactccgcactgctgcaggagatcatcggtggccacgacaagcgtgactccacctccatccccgaaggcccgcgcccgatggtcgccgccgcccgcgaaggcgccaagcgcgatctgaagggtatgaaggtcggcctcatcaaggaactcggcggcgacggcttccagcccggcgtcgaggcccgcttcaacgaggccgtcgacaagctcaaggagatgggtgccgaggtcgttgaggtctcggtcccgcacatcggctactcgctaggcgcttactacatcatcatgccgtccgaggtcagctccaacctggcccgttacgatggcatgcgctacggcctgcgcgtgatgccgccgaccggcgtgccgcagaccgccgccaacatgatggcctacacccgtgaagccggcttcggcgacgaggtcaagcgccgtatcatcctcggcacctacgccctgtccgccggctactacgacgcctggtacggctcggcccagaaggtccgcacgctgattatcgaagacttcaagaaggccttcgaacaggtcgacgtgctcgtggcccccaccagcccgtccaccgccttcaagttcggcgagaagatggacgacccgctggccatgtacatgaacgacatcgccaccattccggccaacctcgccggcgtgcctgccatgtccatcccggccggcctgtccgacgacggcctgcccgtcggcttccagttcatcgccccgcagcagcgcgacgaagtcatgtacaagccggccgcggccctcgaagccgcgctggaagacagctggaacggcccgatctggaacgacctcaagaccccgtggcttgacggtctgggcaagtgagcatcggaaggaaagaaacaacatcatggctgaaaaactgatgaagtacgccgatgccaccaagaagtacgatgtggtcttcggtctggaaacccacgtggagctgtccacgaacaccaagctgttctgcccggcccacatcgagttcggtggcgagccgaacaccgagctgaccccggtgagccttggcctgccgggctctctgccggtgatcaacaagaccgccgtcgattacgccatcaagctgggtctggccctgcactgcgaaatcgccgagtggagccagttcgcccgtaagaactacttctacccggacatgccgcgcgactaccagatctcgcagtacgacaagcccaccaacggcaacggctacctggacgtcgagctggaagacggcaccgtgttccgcgtgccgatcgagcgcgcgcacatcgaggacgacgccggcaagaacacccacgtgggtggcgccgacggccgtatcgaaggtgccgaccactcgctggtcgactacaaccgtgccggtgtgccgctgattgagatcgtcaccaagccgatcgagggggcgggcgaccgtgctcccgaaatcgccggtgcctatgtgcgcgccatccgcgacatcgtgcgcgcgttgaacatctcccacgctcgtatggagcagggcaacatgcgcgctgacgtgaacgtctcgttgcgcccgagcccggacgctccgtacggcacccgttccgagaccaagaatgtgaactcgttccgcggcatcgagaagaccatccagtacgagattcgccgtcaggccgctcgtctggacgacggcaaggagattctgcaggagacccgccactgggatgaggctacgcagaccaccgctggcggccgtctgaagtccgatgccgacgactaccgctacttcccggaccccgacctcgtcatgctccacatcaccaaggagcacatcgaggagatgaaggcccagatgccggaaatgccgcgcgagcgccgcaaccgcctcaagtccgagtggggcctgagtgatctgcagatgcgcgacatcctcaacgccgacgccctcgacctgattgaggaaaccgtcaaggccggtgccaaggctgccggtgcccgcaagtggtggctgggcgagctttcccgcgaagccaacgccaagggtgtgtccctcgaagagctgccgatcaccccggccgatgtggccgaggtcgagaagctcatcgcctccggcaagctcaacgacaagctcgccaagcagaccgtcgaaggcgtgcttaagggcgaaggcactccggatgaagtcgtcaagaagcacgactacaagatcgtcgaagacaacggtgccatcgaggcggccgtcgacgcggcgttcgaagccaacccggacgttgtcgagaagctcaagagcggcaacatgaagccgatgggtgtaatcatcggtgccgtgatgaaggccacgcgcggtcaggccgacgccaaggccgtcaccaaggtcgtcatgggcaagatcaagggctgattagattcactggctcccgctggtgggagctgtcgaacggagtgagactgagggtggtcgccatgtacggatgaccaccctcagtccgcttcgcggacagctcccgccagcgggagcacttatttgtagggaaattctccagttcaaatccgttagacagctcccgccagcgggagcctttattgattctgtaagaaagtcgactcagagcatttccagcgttcacccagtcgagtaagatatgttcggcactggaccgtgagccgaaacaagccgaaccgggggacgtataccgatgaccgcaaccaacgagacgctgagcatggctaccgaagcgcaactgaagcgcgatctgccacagagcatcgtcattccgccaatccgtggcgaaatggtgcacctgcgccccgccaccgtcgaggacctgcctcgtttggatgaacttgatgccttctatggcgcatccaagatcacaggtaaggatgcggtcaccgaacgcgccatcgtacacacgtgggtccgccgctcccaggcttgggaagccggtcaggcacccgccgaatccggtgtgggtgatccggaatcccgccgcaccatcgcatgggccgtattgactgacgccgaccatgacgatgacggtcagctcgatgcggccagcaccgataatgtcatcggcatgattttccttatcgacatcgacggctggtccaagtccgcccgcatccagatcatcttgggccgtgaataccgtggccgcggctactcccgtgacgccatgccgcgtgtgatgacctacggtttcgcgcccgaaccggccggcttgggcatgcaccgcatctgggtgagcgtgccggaaaagaacagccgctcgatttcggtctaccagtcgctcggcttcgtgccgtccggcacctcgcgcgacgcgttgtgggatgccgaaaacaacaaataccaggaccttatcgtcatggacacgttggctgacgagtacgatccgattcgttcgcttgacgcttttggcatgcacttgattgaggacaacccgggtgtcaaggaagcgctgtccgcgcgcgagcattccatcgccatccagcagaacaagccggaacccgagccggcacagcgtggtgaggcagccggcgccacgacgagtgacgtgcagtcccaggcccagacgccggcggccgcacagccagtcgagccacaggccgagcaccacgacgatacgcagaagaacacgcgccacagtctcgaagaggaaagcaactggccgtacggtcaggcagaacgcaagccctcaaaggaagcatggtggcgtacgctgggccgcggccgcaaacgcgatacggaaagtgagtgagtaaacaagcatgagtgccgaggatctcgacaattacgaaaccgacgccgaactcgcgctgtatagggaataccgtgacgtcatcaagctgttcacctatgtggtggagactgagcgtcgcttctacttggcgaataaggtcgatttcaacgtgcgttccgctggtcaggacgtgtatttcgatgtgcagctgactgacgcatgggtatgggatgtctaccgttccagccgtttcgtcaagtccgtgcgcatcgtgaccttcaaggacgtgaacgtcgaagaagtccagaaaaccgatatcgacattcccgacgatattcactgacaggcaatcgtctgatacagcctgtattgacaatgcgcggcattccgtcatcttacggcggggcgtcgcgcattgttcatacaacgcatagcaaaagttcagactcgtaaccttgccatcgtgtgtcttgtttgcttgcggctgatagaaaatgctgcatgaacacacaccatatgcagcagggccttaagggctccatcgcgggcgtggttgctgccgccacattgctggccggtggcatcctgaccgttccgcacgccatggctttggaggccgatggccagtattacagcagcaagcagccatatgtggcacctagcgaagcgaccactgccagctatagccaggcgccggaaggctacgaaacggtatacaccgagtcgatggctcgccacggttcacgcggcctgtccagctacaaatacgacgcattgcttatgaagatggccgaagccgccgaagcggataacggttttaagtctgatgccatcaagtccgaattcatgaagaatctcaaagccatcaccgccgcaaatgtggagaatggctacggtatgctcaccggtcagggtgctgaccaacatcagggcattggcgcacgtgcctacgagcgcaacaagacgctgttcgacaacgcagccaaggacggtggcaagattgcctatcagtcttctggcgaagcccgcgctactgaatcaggcgagaattttgctcgcggtttcaacgcggcctcgaacaataaactggcgaacagcactgtgacgcccgccgatccggccggcaccggcgaggcggcggctttcgacaagacgccgaacacgctgtacttccacaagtccgaaaacccggacggcactgagaaaaccggtgaggccaagcagcgtgccgacgattaccagaacttcgtggaaaacgatgcgattatcgcaggcgctgagcaaaccatcgccgaaaacgaggacgtgaaaacagcctctcacgatttgctttcacaaatcttcaccgatgacttcctcgccaaactggccgacggcacgtacgcctggtacaacactgtcgatggcaccaagggcggcgaggccaactgcgcgccgggagccgaccccagcaaggatgccgacgcctgcggcgcagccaagaagaagatcgcctccgaatacgatgccgcgatggatctgtacaacctgtacatcatcgccgctgatatggagaacgagaacaccggcagccataccttcgacttcaaccagtacttccaaggtgagcaggcagacgacgccaagttgttcgcctgggcgcttgacgccgaggacttctacgagaagggcccgagctacgccggccaagacgagacctacacaatcgcacagccgctgcttgacgatttcttctcgtcgattgatgagcgcgtaaacggcggatccaccgttgctactttccgctttgcccatgccgaaacgatgatgccgttcgccgcgctgcttggccttcccggttccacccagcaggcggccgccagcaccaccgacgtgtacacctacgccaacaatgaatggcgcggtgaatcggtgactccgatggccgctaatgtgcagtgggatgttgcagtcaaatccggcaacgacccgaagaccggccgtgcctacacgccgctcgttcgtatgctctacaacgagcaggaaatcgccttccgctccgaatgcacgccgattgccgatggttccacgtggtacaagctcactgagcttaaaagttgcttggcctccgaccaccaaaccctaggcgacgatgcgcatctgactgatgattccacaacgcagccgggcacaggacctaacactggtgaaggaacgagtaccactccgaataacaatggtgcgggaactcatcagcccagcaacactcaggctaatggtacggaaaacgagttgagtcgtactggtgttgccgttactggtgttgcggggattatgatgctgcttgcacttgcaggcatctcgctgaatctatggaaagttcgtcgctgacgaattagcctaagaccaaaccgattcgccgcgctgtgtgtgacgcaacgttgccgaatacccccacctcacgattcgatgcgtcgcctttctgctgatggaaagacggcgcatcggtcgtatatcgggagaattctgtaagcattcgctcatctttcggtgtgcgattccggggcttctagtagactgtctctgattttgcgtttataaggagcataatgaccgacaagcaatccgtagtgattatcggcggcggtccggctggacttaccgccgcatgggaactcatcaaggacggcggtgccgacaagtacgacgtgaccgtgctggaggggacccgcgaattcggcggtatctcgcgcaccgtgaagcacaacggcaaccgcatggatatcggcggccaccgtttcttctccaaagacgaacgcatcatggattggtggaagaccgttctgccgttgcagggcgcaccctcctatgatgacaagaagctcggccgcgaccacgacatggagccgggcggccccgatccggagacggaggacaaggtgatgctcaagcgccaccgagtgtcccgtatcttctggaaccgccacttcttcgattacccgatttcgctgagccccaacacgttgaaggccatgggcttcaagctcaccatggtggccggcttcagctacctgaagtccatgttccacaagctgccggaagacaatctggagaacttctacatcaaccgtttcggccgcaagctgtattcgatgttcttcgagggctacacggagaagctgtggggccgccacccctcccagatctccgccgactggggcgcccagcgcgtcaagggcctgtccatcatgggcgtgctcaagaacgccttccagaagctgctgcccaagaagcgctccaacgcggaggtcgagacctcgctgatcgaggagttctggtatccgaagtacggtcccggccagctgtgggagaccgtcgagtccaattgcgaggccgccggcgtcaaggtgctgaccgacgccagggtggtcgaggtccgccagaccgatggtgccgtgtcttccgtggtgtacgaggattccgagggcaaccgcaccgagctttccggcgaccagttcatctcctcgatgccggtcaaggacctggtcaacgccatcgacgcggccggcgccgatcccgaggccgttgattccaagcccgccccggccgatatgaccgaggtggccaacggcctgccgtaccgcgatttcgtgaccgtgggcctgctggtcaagcacctgaagctcaagaacaccaccagcatccccaccctcggcaatccgccgatcgtgccggactgctggatctacgtgcaggacccgggctacaaggtcggccgtctgcagatcttcaacaactggagcccgtacctggtcaaggacgtggacgacaccgtgtggatcggtctcgagtacttctgcgaggagggcgactcgttctggaacatgagcgaggaggatgtcaccaagttcgcgatttccgagctcacccgcatgcgtgtgatcaacggtccggacgaggtcatcgactcccatcgtgagcgcgtcaggaaggcgtaccccgcctacttcgacacctatgagcacatggacgagctcatcgagtacctcgacggcttcggcaacctgtactgcgtgggccgtaacggccagcaccgctacaacaacatggaccactccatggccaccgccatggaggccgtcggcaacatcaagaccggcaagacgtccaagaagaacgtgtggtccgtcaacaccgaaaagtcctaccacgaagaaaagtgaataaaccttgttgagctccctcgtcacagagggagcttttttggttttcggcgggccgttttgcgttggtcgagttggcgttgtacagtgaacgaagttcgcagagactcagagacgcagcgaacattcatgagcggtgcaaccgcaataatcactcttaacgcctggataggcatgggtctgttcggtatggaaagggcaaccagtggcaaatagccagaatcttgaggatatgaagctgcctgagctcaaagagctcgctaaacagatgggcctgcgcggcacgtcgaccatgcgcaagcccgagctgctcgccaccctgcaggcggcgcgcaatggtggagagccgccggccggtgtgaccgtgcgcgcccccaaggccgccaaaaccgccaaggtcgtcaaggctccgcagtccgatgccgctgaggccaacaccacagacaatgctgacgtggccacccagtcgccggctccggctccggctgccacggaaccgcagctcgatttgccgcttcccgtggccgacgatgccaagaaggacgagaccgaaccgcgacgcacccgtcgtaaggccgccgatgatgccgcatccgaaccgcgtgcggcccgccgtcgtcgcgatgacgaccagcccgatttcgctcgccgcaagccgcgcaagaaggccgatgaggccggcgatctgctggccacgctcgatttgggagatgcagcgcctaccgaacgtcgccgcgagcgtcacgaggacgtggaagttccgctgattcgccgagtccgtgatgatgaggacgagcagcctcgccgccgtcgtcgcactgcggaaaacagcgaagaaaccgtgcgtgacctcgacgatatcctggccacgctgcccacgcagaagcacgaggaaacgtccgaagacggcgagcagaacgacgatcacgagttcgtgcgtcgtaaccgccgcgaccgtagcgatcgcaacgatcgcgatacccgtaatgatcgcagcgatcgccgtaaccgtcgcatgcgtggccgtgatcgcgacaacgccgatgatgatcgtcgctatgatgatcgcgataatcgtagcgatcgcaatgaccgtgatagccgccgcgaagagccgcaggaggatctggtgccggtggccggcatcgtcgacgtgctcgactcctacgcttttgtgcgcacttccggctacctgcccggcccgaacgacgtgtacgtttccatgggccaggtcaagaagtacggcctgcgcaagggcgatgccgtgcatggttcgattcgcgccccgcgtgaaggcgaccgccgcaaccagcgccagaagttcgtgccgctgcaggccatcgattccatcaacggccaaagcgttgaagaagcgctcaaccgtccgcagttctccaagctcacgccgctgtacccgcaggagcgtttgaagcaggagaccgccccgaacaagctcaccggccgtatcatggacatcgtttccccaatcggcaagggccagcgtggcctgattgtctccccgccgaaggccggtaagaccatcaccctgcagaacatcgccaactccatcgccgccaacaaccccgaggtccaccttatggtggtgctcgtggacgagcgacccgaagaggtcaccgatatggagcgcacggtccagggcgaggtcatttcctccaccttcgaccgtccggcctccgatcacactacggttgccgaactggccgtcgaacgcgccaagcgtcttgtggagctcggccaggacgtggtcgtactgctcgattccatgacccgactggctcgcgcttacaacatcgcagcccctgcctccggccgcatcctgtccggtggtgtggacgcgcaggccctctacccgccgaagaagttcttcggtgcggcccgcaacatcgaaaacggcggctccctgaccatcatctcatctgcgctggtggaaaccggctccaagatggacgaggtgattttcgaggagttcaagggcaccggcaacatggaactgcgcctgtcccgcgagctggcggacaagcgactgttcccggccatcgacatcaacgcttccggcacccgccgcgaggagctcatcaccaacccgcaggaactgccgattatctaccgtctgcgtcgactgctgggcggcatggagcccgagcaggcctaccagacgctggtgccgcgcctcaagaagaccgccaccaaccgcgacttcctcgccgccatcgtgcagcaggccaacaccggcaacgcggtcaacggcaactgatcagaccgctgaacaatagtgtaagggctgcaccctgattgatacggggtgcagcccttgtcgtatctgatgcaaatacatcaactatcacattgcagttgtagtattgccgtcaacgttcacatgcacgctgacgatatatgagatgaaagaggcatcactgggttcgattgttttgggagtgggcagtggtgcggccatgttcggcgatgcggatgccagccatatcctcaccggcgactatgacatctgagatatctgactttgcgcatcgtgcaaagccgtaatcgggagtatcctcgaatctatgagcgaaacgagcagcgactggcaaaggaccaccatcgactccgcccaggcggcggcccacccggaaaccgcacaagcggtggcgcgcatcaaagcgctgcgccaaaccatcgataacatcgattcggcggtcatcgcattactggccgagcggttcaaggccacctcgcaggtcggcgtgctcaaagccaacgccggattcgcgcccgaagacaccaagcgtgaggactatcagatcgaacgcctccaccgcatcgccatcgatgccgggcttgatccggaaattgccgaaatgtaccgtgaattcgtggttaccgaagccaagaagcgccaccagcgcatagccgatgccggtggtgacccgggcgtactcgacgtattcgcctgattcgcccgcagcgaatgggcacctttcggatattcgtctatagggcaagttgcctgcagcgactacattaatacgggaatggaatgcccgtagtggtcgactgtatgaatgggatacgtagatgagatgtggtgccgcactggtcagttgcgcattgtgcgtggcttcgattctcggcggtgcttggatgtctcgtccgactccggttgattacggtccggtgctcgctacggcaagtgatatgtacgccgtcaccgatgccgaaggggagccggtccgttggtatgtggtagggaagggcggcgccggcaatggcgccagtgccgattccggcaatagcggttccactgataccgattccgccaatagtaattccggcacgtccaaggtttctcgtatccccgcttccgccgccaccctgccatggaaagtcagcgtcacctactcgcttgacggtccgaacgtcgaggcaaacgaggttgccggcgcgtctggactgatcggcgtgtatatcgatattaagccgcaaaccaaggaagccaaccgtacgatcccggttgtcgcctttaccgtgcctacgcaggtagccgatgatgtttccgctgacaactccattacggtgaccacgcaaggttccaataccgtagtcgccgcagctggaaaagccgcaaccggcttggaattcagctgctatatgaacgccaaagacttctccatgagttccgtggcgctcgccgtattgccttccaattccagcagtccggcagttggtgctaatcccgatgctgcgaatgctgcgaatgctgccgcacagcctgctgccgatacggatgtcgcccaactcaccgcctctgccgccacactggtcgattcactgaccgacgccggttctggtgaacagcaacagctcatcgagcagcttcaaaccctgcgcgataacgaacgtgcgctgaacaagtctgtagtggccgaacgcgaaaccgcccataagcggacgtttgaagactatatggccgcgtatgtgggctcatataccacgcacctgtctggatcgattggcacctccacccagttgccggcgttgatgggcacggccggcgaactgtccggggacacgcctttggctcaagccgtactcgacttggccaacgcggtgaacaacgtcagtgccgcacatcagcatgccggtgcggtcgatgcgttggacgaggtgattcgccgcatccagcagcaaggcaccaccggactggtggatgatctgatcgccgaggcttcggaggaagccactcaaggctccaagcaatacgccgatggccagagccagctctccgccgcaatgattccgtattcgatgaaatacacggacgtttacacggccaatttgagcgccctgaccggcggcacgtcctcgggcgccaccgcttacgagagccaagccatcgccgaaaccaacggtagcgatgaactcgccgacgctcaatccaaggtcgatgccgcgatgagcacgcttgccaccgcctccgagcatacgggcaaagccacggccttgcgccagattgtattgcgattctccgatcagttcgaaggcggcgcgtcctcggcttccggcaatgatggtgatggttcgtccggtgatgtctcttccgatccggtgaccgaggctcaggcactgaccggcctggtcgattcgcaatcgcaatcgttctacggcaagacccgggtcgcccaagccaagcgtaaggccgatgccgcccgtaagcaggccaaagccgcgcaacagcagcagtcgcagcattccaaggcctcactggtcgatgacaccatgtccatgtctgctggcgatgtgatgaactatgcgggtggtcttacttcggccatcggtggtggtgataagtccgactcgtctaagagcgctggttcgggaacgaacgactcagccaagtcgagcgacactggcgattccggcaacggcaaggcctccaacgccagcgattccggcaacaatcttgacaccgctccagtactgttcggctttggcactggcggcacgctgttcaagcacgatatgaacgcgctgattaatgagaccgtgaaaatcagtgatgctggcacgctcttggcgcaggccgtcgcgcagctcgacagccccaatacgcaacaaaaaaccgccgaaacccgatatctcatcgtgattccgacggtgtgatggtgtatgcgggatatttgcgtgccgtcccacagtcgtgtcatccgaacgtcaaaaaacaaaagaggggaacctcaataggttcccctcttttgttgttgtgcgtaacgttcagtgctttggcttcttagctggccgagccgttaagcgggaagcccggtgggcttcccgtaggctcggaacgagcggcattgccgtgagacctactgttgttgtgcgtaacgttcagtgctttggcttcttagctggcggctcaccgagctcgctggcttcgacggcgacctcggtttcgggcgtgccttcggcggcggattcctcggcgtgcttggccaccaagtcgaacttgccgaccacgcgaccggcctgcgcgatatcgcccaaggcggcgtgaatcgcttccacaccttccgaagcagcggacagtgccacagacaggattggggtcttcatggagaccttggcctcggacttgatcttacgcagctgctccacggccttgccggcccaagtcagcagctcgggggaagcaccggtggcggcctcgacatacgggtccacgaccggccaggcggcgcgatgcacggaaccggaaccggcgtgcatccagctccacacttcctcggtggcgtacggcaggtacggggccagcagacgtgcgaaggcgtccaggcccagacccagagcggtgcgggcggacttcacagccttctcggacggcacattgccgtgctcgtccggagtgccataggcgcggttcttgaccagctcgatgtagtcgtcgcagaactgccagaagtaggactcgatgacttccagcgccttggaatgctcgtaggattccagcgcctcggtggcctgacgcaccaccaaagccagcttggccatagcggcgcgatccagcggttcggtcacatcggccgggttccacgcggcctcggcggcagcgcccacgtgatggttctcgtcctcacggccgatggccagcgcgaacttggtggcgttcagcagcttgatggccagtcgacggccaatcttcatctggccgatgtcgtacgtggcatcgaggcctaggcgagcggcggcggcccagtaacgcacggcgtccgcgccgaacttctcgatcggctcgttcggcaccacgacgttgcccttggacttcgacatcttcttgtggtcggggtccagaatccagccggacagcgtggcatgggcccacggcaggcacttgttctccaagtgcgcgcggtccacagtcgagaacagccaggtgcggatgatgtcctgaccctgcgggcgcaggtccatcgggaaggtggaagcgaacagggccttggaggcctcgtccggctcggcccagtgggtcacgatctgcggggtcagcgaagaggtggcccaggtgtccatgatgtccttttcggcggtgaaaccaccgggcacatcacgctgggactcgtcgtagccctccggcacgtcgatggtcgggtcgatcggcagacgatcctcggacggagtgatcgggtgatcgtaatccggctcgccggaagcgttcaccgggtaccacagcgggaacgggacgccgaagaagcgctgacgggagatcagccagtcgccgttcaggccgtgcacccagttctcataacgcacgcgcatgaagtcggggtggaactcgagttccttgccacgctcgataagctcggcgttcagcttggcgtcggtaccgccgttcttcaaataccactggcgggaggtgacgatctcgagcggcttgtcgcccttctcgtagaagttcgtcatacgcttggtcggggtcggctcgccgtccagatcgccggactcgcgcagcttgtcgacgatgatcttgcgggcggagaacgtggtcttgccagcggtttcggcaaagacctcgcggccggccgggtcctcgatccagtccggggtatccatcacgatacggccgttgcgctggatgatcgggcgggtgggcagcttcaggtcgcgccaccactcgacgtcggttacatcaccgaacgtacagcacatggcgataccggcacccttgtccatttcggcggccgggtgcgccagaatcggcaccttgaccttgaacagaggggagtagacgtactggccgaagtactgcttgtagcgttcgtcgttcgggttggcgatcagcgaggtgcaggccgccagcagttcggggcgggtggtctcgatgtagatcggggtgccgtcctcaaagcggaaggccaccttgtggtagaagccggggtattcgcgcgattcgagctcggcctgggccacggcggtctggaaggtcacatcccacaggccgggggcgtcctgctggtaggcctcgccacgggcgaggttgcgcaggaaggccttctgggccacacgctgcgggtgctgaccgatggtgtggtaggtctgcgaccagtcgatggacagacccagcttgcgccacagggcctcaaacagcttctcatcctgagcagtcagacgctcgcacagctcgatgaagttcttgcgggaaatcggcacctgatccttggcgtcaatcttcttgccatcagtgccttcaaacggcggcttgaagtccgggtcgtaaggcagagacacgtccacgcgcacgccatagtagttctgcacgcggcgctcggtaggcaggccgttgtcatcccaacccatcgggtagaacacgtcgtagccgcgcatgcgcttgtagcgcgcaatcacatcggtgtgcgtgtaagagaacacgtgacccacgtgcagcgaaccggagacggtgggcggcggggtgtcgatggagtagacggccttgcggtcgcgggtgttgcggaatttgtaggtgccgtcttcatcccagacggtgcgccacttgtcctcaagtccgtccacgccgaccttgtcgggcagcggggtgaggttggcgttgatgatggatttgccttcagtcataaggccaaagtttatgcacgttgcatgacaagccgaactgtacagtaaacagcccagtaggctgttcgcaggcgaggtacgaacgatcgaacgatagtgagccaaggactatcgggcgtagcccgtccgtgactgaaggttgcctacttcaccgtcaacccggccagcggcatgcggcgattgatcatcgaggtcgggtagccggagaccttggtggacgccacagtgaagcatttgcgggtatacagccaatcactggccgcatcctcgctgatcagccgggcgtacgccttcattcgtgcctcataatcggcgtcattagtggcggcgcgagcatccgcataggcctgttgcgcttcggtatggtcgtaatggaacatggaatcggggtcggcgaatatgccggcatcatccgtgccgtccatgctcatcacggtcagttcccatttgccgtccttgattcgtttggcataatcctcatcggagagcacttcaaggttcaccgtggggcgcggctgccgctcgatctgctgcttgatggtttcggccaacgaccggtattcttcgggaaccaccagattcaccgtagtcaggtattgcgcaccaaagtaggagaacatctgcccagcttggttttcgtcatgcgggtacagtccggtcaaatcttcgtatccgggttccagcaggctgatggggccgcccaatgctccggctgcgtcgggttgggcggaggcgatgccggctgcgtcgatttgatagcggaaggctttacgcgcctgttcgtcggagagcagcgaatcggtgccgttgttgtaggccagcagcaccttatccgtagtggccccctccttgacggtcaggccatccttgccgttcaagccggtggccgtcgaagccgaaaccggtgccgccatatcgagactgccgtcggtcagggccttgctgagcgcatcggcgtcggagtattgcataaattcaacgacattgctggccgctttggtgccatggtaggtatcgctgcgcgccagcttcagggaatggccaggctggaaatcggccacggtgaatggtccggaacctatggccttgcgttgataatcggcactggacgactcggaatcgtagacaatgccgagtctgccggacagcgctcgcagcagcgtcggattgggcttggcaagcgtaatgaccaccgtggtggcgttcggattggcgaccgacgccagatcgcccaattcgtcgacgtccgccaccttgttggtcacgttctgttgcaacgaccacacggcgtccgaggcgtccaacgtatggccgttcgagaaggtgacgcccgattgcagtgtcagggtgacggtcagtccgtcatcggaagtcttccagcttgtcgccagtcccggctgaagcttgttgtcttgatcgacggtcactaatgtctcatacacattgtcgacgagcaggcgttcggctgccgcagaggaatcggaccgaatatccaaggattgcggcatatcgtcgatgccaatggtcacatcggcatcgagggatgatcccggctggaaccggttttgcatgaacgtccatcccacaaccacgagtgcgccgagtgccacggcgactccgagaaaaatcccccacttggaccatgtattgtcccgcttgctgtgctgcatggttttcagtctagcggtggattcagcctagaatccgcaattcaccatgatgaggtatgagttagcgcttggacgtgctcttgccggcgggcggcgcatagctagggcaggtgtcggacagcgggcagttggcgcagtcaggggtacgtgcgtggcaggtggcccggccgaacagaatcagtcggtggctgagattcgtccactcttcgggcggaaaacaggaggtgatttccttctcgattttcacgggatcggggtgtgcggaccgccaatccgaccgccaacgcagtcgtccggttacgcgcatcacatgcgtatcgaccgggaatccggggatatcgaacgcgttgccgagcacgacgttcgcggttttgcggccgacccccggcaagctggtcagttcatccatcgtgcgcggcaccacgccgccgaatcgttcgtccagtgccgtggccagtccgatgagatgctgggttttcgaacgatagaaccccagcggatgaatgatgtcttcgacttgggccgggtttgcggccgccaagtcacgggcggtggggtaggtggcgaacagttccggggtgaccgtgttgacacgcttgtcggtggtctgggcgctgagcacggtggcgatcagcaattcgagcggattcgagaaatgcagtgcgcaagcgggtgccggaatcacctggcgcagaatgtcgtattcgtcatgcatgcgcgtgagacgcgcggatttggtttctctcatcgtatggacctaagcggcgtaatatcgatgattgatagtttgcagcgccgctggtctgtcaggcgacggtgttgagatcgggagtatcgtcatcggtgtcgatggcggcagaggatgctttggcggcctgctgtgcggcggcagtttccttatccgtctccggcgggtcgaatcggtagcccacgttgcgcacggtgccgatgaggtgttcgtattcgccgccgagcttggcgcgcagacgacggatatgcacgtcgaccgtacgagtgccaccgtagtagtcgtagccccatacttcctgcagcaactgggcgcgcgtgaacacgcggccggggtgctggaccaagtacttgaggagttcgaactccttgtatgccagatcgatggggcgtccatgcagggaggcggtatagccgttggtgtccacaatgaggtcgccggagcgaatctggccatcttccaccgtggtggtggattcggcgggagaaccggctgctgcggctgcgggagcgttgccgcgctcggagaccaatcgcaatcggccctcgacttcggccggggaagcggtggcgaccaccacatccgcaatgccccactgggagttgaccacggtgaagccgccttcggtcagcaccagcacgattggcgtggacaggccggaagcgtggatgaggcggcacaaggttttggcggtcgccagatcatcgcgtgcatccagaaacagaatggtgttctccggcatcttcaccaagctggctgcatccatcggcagtacgcggacgcgatgagaaagcagggcgagtgatggcaaaacggtggcggggtcgctggcgaaagtcatcaacgtaagatccgtcacgctaatcccccttatcctgcaatgtgttacgcaattgctcggtgtggctgtacgagtcgtcagcggcgttatgccgctttcgcacggttttcattattctacgcgcttgtagtggacacataggttacaagtttgcggaatatggaacggcggacgtccatcaaccgatgatacggccgagcaccagtgcggttgcggcgatggtcacgcccatcagcattaccggcatcaggccggtaccgatccacggatagcggatatccgggtccggatcggcgtcgcgcacccacaacgtggaggctacggccaaagccagtcccaaaacgatgaggatgatcagggcaacggttcccgcaacggtgcccttggcgagcatcgcgcccaaatcaggcaggaagcaccagccggccacggcgagagctgccacaccggaagtcacggcgtgagagagtgcgcggataagatgttcgcgcttctcacgagccatctggcgtccgaaggagaagaccaccagcaccaccagcagcaggcccatggccagtgcccatgaataccaaggaagtaccgagccatccgcagcggtctgatccggcggaacctcgccggtcgggaaaggtacgatgacgaaaatcagagaaatcgcgccaaacaccaaagtgacgatacgatccagcatgctgccgcggaacggccagaatacgacaaatgcggccagcgtcagagcggcgataatcaaagggatgatggggacggtgccaggggagggaatgaccgtggctgcgatgaacagtacataggacgtcagttgggccaacaacatgctcagagctttgttcttccaaccctcctgggtgatctcggtcatgatacgcctctcagataatcgaatttctatcccaatcctacgtcgggcattggaacggtgaaatcaaacaaaatagccccttctggtgaaggggcttatggcactaaatcagaacgcgataacgcccaaatgctccaatagcactttgatgccgagtagaatcagcaccacgccgccggcgatctgcgccggcttctgccagcgggaaccgaacgcgcggccaatgtgcaggcccgcagcggagaacagtccggtgaccacaccgatgctgaggatggcgaatgccatatgggctttggtgaacatgaaggccaggctcacgcccacggcgaacgcatcgatgctgcaggccacggccaggggaagcatatgcttccaatcgaactgggcggtctccttggagttttcctcatcttcttcgaaggcttcgtgaaccatgttgccgccgatgaacaccaacagggcgaagatgatccaatggtcgaattgggttacgtatttgctgaatgtagatgccgcgaaatagccgagaatagggaacagcatctggaatccgccgaaccagagggcgcttttcacggcgtcttgtactcgtacgcgggatacggtcaggcctttgccaatggatacggcgaatgcatccatagctacggaaacagaaataagcaggatttgaatgattatcgaaatcatggtgtgacagaaggttcatcgccggattaccgtgcgatgggcctcgaccagcgttcctacacgccgcctacgcctagttgaaaagacaaaacattactgtatcacaaaatacaagctccctctgttggggagctggcgcagtgaaactgcgactgagggagagtagagcggctttgccacaaatacaacaaaaggcccccgaaggggcctcctgtcaacgattcagaatcgaatcacttctcggaatcggcgagacgctgacgagccgcgacgatttccttttcggcatgcaattacggacggcctgcggccggctcaatgctggctcagccgctgtcgcgtctttgcgcgccgccgccggaaagcccaccgggctttcctaaaggaaatcacttgccttcgttcgcgagacgctcacgcgcggcaatgatttccttttcggcggcgtcagcaccagtccagtagtcgcccggcaggacttccttgcccggctccagagccttgtactgctcgaagaagtgcttgatttcggccttgtggtactcgttgacgtcgtcgatgtccttgatgtcatcgaaacgaacgtcggcgggcacgcacagcaccttgtcgtcgccgccggcctcgtcgaccatgtggtacaggcccacggcgcggcactcgaccacgcagcccgggaacacggagttcggaatcatcacgagagcgtccagcggatcgccgtcctcgcccagggtgccgtcgatgtagccgtagtcatccgggtaacccattgcggtgaacagggtacggtccaggaagacgcgaccggtctcgtgatcgacttcgtacttgttcttggagccgcgcggaatttccacaacgacgttgaaggtttctgccatgtcatttctccttgaaaatcgacagttacgttatcgtctcaccacaataccctgtttacgcctgcaaaacaggtgcggaactcaagaaaccgtgctgagattatgccgacactatgcccaaacagacgaaatcctccccttgaggggaggatttctagcggtttacgcgcacgataaacccatgcacgtcaacggcatcactgttgcattaccgttgcagtaccgcatcactgcacggacaggatgtgggccacatccgcccaaggagccagagacacgtagttgtcccaaccccactggaattcgcggccggtcagctcgtcgcgcacgttgagcgggcggtcggtgggcagacccagctcgccgagttccaggtgaatcatcgactggtgtgcgttgtgtccatcgaggttcacgaccacaatcagcgtgtccgcttggccggtaccggtcagttcggccggcgtgtggcgtgcgaaagccagaatattcgggtcggacgtaggtagcacggtgaggttgtggtagctcaacgcggccgggtgggcgcgacgaatcttgttgagcgcggtgagcatctcggccacgccgtactgcttggccttgctccaatcgcgaaccttgacctcgtacttctcgttgttgatctgctcttcgaagccggggcgctgcttgttctcgatgagttcgtaaccgttgtagataccccaggacggcgagcccatggctgccagcaccgcacgcacgcagtggccggctacgccgttgtctcgcacgtaagcggtgagaatatccggcgtggtgggccagaaggtgttgtgctggtagtagccgtcgtcgccattggtgaccggcagatactcttccagttcgtccttggtgttgcgccacgggaagtagcagtgggactgggtgaagcccacgtagctcagggcgcgcatcatgcccgggcgggtgaatgcctcggccaggaacaggatctccgggtgcttcttggtcacggcggcaatcacgtcctgccagaaacgcaccggcttggtgtgcgggttatcgatgcggaagatggtgacgcccgcctcgatccacagattcatgatgcgttcgacttctttttcgatgccgggcatgtcggcgttgaagtcgatcgggtagatgtcctgatacttcttcggcgggttctcggcgaaggcgatggagccgtccggcttgtggcggaaccagttcgggtgggccttgacccacgggtgatcgggcgagcactgcagggcgaaatcaagcgcgatttccagacccagttcatgtgcacgctggcacagggccttgaaatcgtccatggtgccgagcagcggatccacggtgtcgtggccacctagctcggagccgatgccgaacggggagcccgggtcatcggggccggcgaccagcgtgttgttgcggcccttgcggttggtcacgccaatcgggaagaccggcggcaggtagacgatgtcgaagccctcggcagcggcgcgttcgaggccggtcatcgaagtcttcagcgtaccctgaatgatcttgccggtgttcggatcgatggtggcgccttcggaacgcgggaagaactggtaccaagccgcgaagctggacttcgggcgttccaccttgaagcgctggggctggctgggggagatgccgtcgcgcagcgggtgagtctcgtgcagggcggcgatggtcgggttgtcgccggcggcgagacgatcctcggcgctcagcgtctgatcggccatggtctcagcggccttctccaaggtcttgcgatcgcgtgcggtcaggccggtgtccggggtttcggcccaacgggccagcaactcggcaccggaattgagtgcgttgtccacgtcgtccatcacgcgcaccttgatgcgggcgtcgtgcagccaggagacgtacgcgtcttcccaaccttcgatggtcacggtccattcgccgagctgacgcttgacggccgcgtagccatcctcccaaggcttcagatcgctgtgctcgccgcacttgaccatcacggtccaacgatcgaggccgggatttacgcaggtcatggcccggcgcatggtttccttgccgcgcgggttgcgcacgatggcggtggcacccaccttggtacggccttcgatgaacacctgggcggtcatctcaaacggttcgccgagttccacacgggcggggaagatgccgcgctcctcggcgggagtgatgtccatgacattgatgcggccgaactggccgggctcgtttgcttcgatggacggtgcgggggcttcgacagccaggcctttcagcgctgctgcggcgcgtgccgtttcggcgctgactctcttgcgcttggttgcggggctctttcgggcagaagtcgcctttgacttcgttttcgtggtgctgttatcggtattactagtgcgcgtggtcgcgcgatgttgtactgctgccataaggccctattctaagggcttttgaacatatgttgcgcattgtggataactatcaggtaaacgttcggtcaaccgcatgaggtggataactcggcggaagagttatccacaactcgccggcaaacggcaagctcggaccacataggtcgaaaaaccggctgtagcgaatgaaaatctgccatgatcgtggcctacccgcacacagtgcagtatgcggggaaacgtaccaggaaaggacgaatgatgataacgacatggcggcaacggggcatggccatcgtagcgatgctgaccggtctgataataatggtgggagtggtgttcggctcggcgaatacggcgtatgccgcgacgttgacgcccgccgacgaaagatatcacgtggcgtttccatacaacgatatggaatattacgtcggtgtcgcggggctggacgcttcgggcaacaagtactactgcatcgaagcggggaaactgagcgactatgtgataggccccaccacggtgcttgcctccgatgagaacgcccggcgtatggcatggatccttgaccggtaccgcgacacggatgccgccacccatgcggcgatcggcatcatcgtgcaggatcacttcgggcgcgatcgggacgagtgggcgagacagatggcggtcattcaaggccggtaccccgagatcgtggcgaaggcggcccggatatgggatcaatcggccggcaagacgcctgcgggcacgacggtggaacgcaccgatgccgaggctttgcgcagcggttccatctcggtgaaagtggtgaaccgcgccggtgacgcgatcgcgggagtgccgttcaccgtcaccttgcagggggcggcgcggttcgtccaaggcggcaacacgttctcgggggtgtcgacgagcgccgggtcctcgatcgcgtgggaggcgaccggcgccggcgaggtgacggcgaacaccacatacgagtatgggcggatgcacgtcatggacagcactcaggacatgctggcctttgactcgatggcttccactggcggcgcgtcgacgacatttcgggtgcgtaaggattttgttccggcggtatccaccaaggtctccgagaaggtgcttgatgtggcttctccggtgttcgatgacgtgaccagtggcgtggcggatgcggacagttattgggtgcccgatttggaattgcaggcccgcggatactatttcgatggtcttgatacgggcgatgtgggcaatgtcattacgccgaatgcacaagagagcgccgatgcttttcttgcgcgattggcgactttgggttatgagccggtggcctatggcaaggcctctttcaccggggtggggcagcaggcacgtgtgcaggccatgaccaagccggatgacggtgccgcttaccggaccaagcagaatagcggttttggcacatgggtatgggtgtttcggcggtccgagcagagcaaacaggcgcaggaataccttataggcgactggataagtccgtttatggaggctacggaaagcaatacaagtcgcaggaagctagaagtcatgtcgacggtcactgagcattcggcggatatcggtgccgagctcagcgacaccattaccgtatcgggattccctgcggatcatggccagtatgccggcaacgaagagtatgagttcgcggcggatcggccgtatgcgacggtgagcgtatggtggtccggcgatcccgacaacccctccaacgatgaggcgtacaagccatctgggggagaggttcccacggaagacgacaaccaccggttgctggccacctgggagattcccgcgatgaacggcacgttcaaaatcggcgccggggcgttggacgcgcatggcgctcctatgtatctgaccgccgaacggcctgggtggtacgtgttcgtctggcggttcgagggggatgaccgtgtttccccggcgtccagccggtatgacgatgcctgggagcgtgtgcgggtgttgcccccatgcgagtcggagaaaccgtgcgaaccggagaaacccgagacaccgccggcgccggcggaggcaaccacgcccaaccctcgcccgtcactgcccgtcacgggtggcgatgtgtcgcttgcctcggttctggccgtgtcagctctggcgataggcgccatactgtccatcgtcgttcggtggcgtcgtcgctatgaccgattcaagcactggacgatgcgctggccgatacgttgacccgctgcggcatgatgccgatgatgtcggctggatggtgaaccacactccgcttctgagcagaagaacgggagctgggcacgaagtcgatcgtaacatacgacttgtgcccggcttccgcttcgttgagaaacttcacgcctgtcgcctcccgtggattagacaactgaagatccgcgatgaaaatgacgagacgtttatgatcgccgacttccctgggcaccgtagctgcctgatcgcctttcatccatatcgccacggtaaacggaaaggccgctgatttcggtaccgaaatcagcggccatataaccacgttcgtagcggggcatggatttgaaccatggacctctgggttatgagcccagcgagctaccgagctgctccaccccgcgtcggcttgtctctcagacagctctatctacaataggtgcagattccagaaagtcaacatcggcgtgtcgcgtcatcttcccgcggttttaaaacgtgaattggctcacgcagcgaggggtttggggcggagtcggagtcggggtaataacgcgccataaatggccgttataggaatgccctgaaccgttatcccgaatattgacataataggaacatgcctatcaagatccccagtggcctgccggccagagatatcctcgattcggagcgcatcttcgctctggagaagcccgaggcggagcgtcagcgcgtccgcccgctcaaactggtgatcctgaacttgatgcctaagaaaatcgagactgaaacacagctgctgcgtctgatttccaagtcgccgctgcaggtcgaaatcgacttcatgaagacctccacgcatgaggccacgcacgtttccgccgatcatctcgtcaagttctacgaaaacctcgatgcgttcaaagacaactattacgacggttttgtggtcaccggcgcgcctgtagagcatatgccgttcgaagatgtggactactgggacgagttcaagacgattctcgactgggcctccacccatgtgttctccaccatgtacctgtgctggggtgcgatgggcgcactgtactaccgttacggcatccacaaggtggattaccccgagaagattttcggcgtattcccgcagtacctgcaggacgaatactgcttcctgaccaatggcttcgacgagattgatctgcagccgcactcccgcctcgccggcgtgaacgaaaacgaggtacgtgccaaccatgaccttcagatcttgacttgggggccgcagtccggcccgggcctgatcgccacgcgtgacttctccgaagtgttcgcgctcggccattgggagtacggcaagtacacgctcgccgaggaatacgagcgcgatatggccaagggtatgaccaacgtgcccttcccgaagaactacttcccgcatgacgatccgaagctggaaccgttgttcgcctggcgcgcccacgccaatctgctgtggcgcaactggctcaactgggtgtaccagaccacgccgtatgacctgaccgaggtgccgcagctcagggctgagaagaagctcggtactgatcgttcgattcggcatgagccgggcgggccgcgccaggatgatttcaagccgtttgtgcatgacgggtatggggtgattcagggctgagcctacgatctcccctcagtcgcctacgacgacagctcccctcgacggggagctcctttgcttctccttcacggctcggcccatcagagggagctactgttggaggttgcgttcgtagcgtggacggttgttcgtccacgatgtggacggcttgatgaacgtaatgccacacatccgcgtaatgcgaccaatagtgcacaacgttcgcgaaacgcccgggaaaaccttgcagcagtagggatttcaggagactcgccggtataatattgacattgtctagacgcaggcaaataatcactcttcagtcattcggagccgaatgcccagcgcagactccgtgtccatgcccggcagactccacaccgaggagacaaaaaaagacgaaagtaacgagcacgtcacatttgcctgcccggtgggtttaaactgacacctgacattgaagaagcaggaggcgtgatatggtcggttcgctcagcgcaggattgctgttggctgacgaggcaggcgctcatctgccctcggttgatgacttccttcccccggagattctgttccagggaactccgtttgccatcaaccgcattattttgattcgtatcgtggcaaccatcgtgctgttggtggtgctcggcgtgaccgcaaagcgcgccaagctcatccccggccgttggcagggcgtagtcgagtacggtctcgacttcgtgcgcgacaaggtcgtgtatgacgtgatgggtgaggcccgtggcaagcgctacgtgccgatgatcaccaccctgttcttcacgatcttcattttcaacctgtgcggcatcattccaggtatgaacatggcggccaacgccacggtggtcatgccgctcgtgttcgctgtctggacactgatccagtactggatcgccgccatccgctcgcagggcctcggccactatctgcgccacgagctgttcacccccggtgtgccgtggccggtctatttcctgctggctccgatcaacctgcttgagctgttgatcatccgcccggcctccctgaccatccgtctgttcgccaacatggtttccggccaccttatggtcgccacctgcctggcgttcgcacagttctggatggttgacgcggtcaataagctgcagggcatcccggtgggtgcgctgtggttcgccggtggtttcgccatgacctgcttcgaggcgttcgtcgccttcctgcaagcctacgtcttcgcgattctttccaccgtgtacatcaacctgagcttcccggaagagtgacgggcgactaacccgccgcttccggtccccggtctgggaaaatcgcagaccgaccaaaccccaagatttataacgtcgccaagtacgttagaaaggaaacacaatggatatcatcaccctcgcagaggtcgccggcaacctgtccgtcatcggttacggtatcggtactcttggccctggcattggtctgggcatcctcttcggcaaggccatggaatccaccgctcgtcagcctgagatgtccggcaagatccagaccatcatgttcatcggcctggctctggtcgaggtgctggcactgatcggcttcgtcgccgccctgatcatctgatctgcgcagatcaacagacgaaaaccgattatgtccatcactgaaaggagggcttgatgacacaagcagcaagcgggattgacctgttcattcctgaggtttatgacatcgtatggtcgctgatcattcttgtcatcgttgcggtgttcttctacaagttcttcatgccgaagttcaatgcgatcttcgacgagcgcgccgccaagattcagggcaacatcgccaaggcggagcaggctaggaaggacgccgacgaggccaaggccaagtatgaggcccagctgagcaccgcccgtgtggacgccgccaagattcgcgacgacgcccgtgcggaagcgtcccacatcatcgccgacgctcgttcccgcgccgagtccgatgcggcccagatcaccgcatccgcacagcgctcgatcgaatcccagcaccagcaggccatcgtctcgctcaagggcgaggtcggcgcacttgccaccgccctggccggcaagatcctcggtgccaagctggaagacaacgacgtgcagtcctcgatgatcgattcgatgatcgacgacctgggcgccaagaagtgaccgtgaccatccgtaaccagaaagggaggtgaccatgcgaggagaggcatcacgtattgcagaccgcgagtcgcgtgattcgctggccccgaaactgcgcgacacccgtgaggacgcgtggcggatcggcaacgaactgttcacgatcaccaaggtgctcgatgacagcattcagctggagcgcgcactgaccgacccgtcccgcccggttgccgacaaggtggccgtcctgaaggaactgctcggtgacaacgcgcatccgatgaccatggagatcatgactgacttggtctcccgccgttggagccgtgcgcgcgacatcgccaacgcagtggaagacttcggcgtggacgccatgatgtactacgcggacgccactgacgccacgctgcaggtatccatcgagctgtccgagctgcattccgcactgctgaacctgccggtcgtacgcgccaagctgtacgactaccaggccaccagcgaggcccgtgtgaagctgttccgtgaggtgttctctggcaagaccctgaacaaggtcaccatgaggctcgccgaacacgccacttgcaacctgcgccgccgccgctacttggagaccatccagtggctgatcaacaagttctcccgccacatgggcgagtcgatggtcaccgtgaccaccgccaccccgctgaagaaggagcagatcaagcgactggtcgaggtctactccgccaaggtgggccgtcaggtgcacatcaactcggtggtcgacccgaccgtgctgggtggcatgcgcatccaggtgggcgacgaagtcacggacaacaccgtggtcgcacagctgcagaacctgcatcgcaaggtgcagacggaggcgactccggcctgaccggccgagccaatccgtccaacaccacacacaagcaaagacttgactgaacaataaccaatagaaggagtgatcatggcagaactgaccatcgatcccgcctcgattcgcaaggccctcgacgacttcgtgtcgtcgtacaagccgagcgacacccccacccaggaagtgggctatgtcgccacggccggtgacggcattgcacacgtgacgggattgcctggttgcatggccaatgagctgctgacgttcgaagacggcacgctcggcctggcgttcaaccttgacgcccgtgagatcggcgtggtgatcctcggcgatttcgctggaattgaggaaggccaggaagtgcgacgcaccggcgaagtgctttccgtgcccgtcggcgacggctatctcggccgcgtcgtggacccgctgggcaagccgctcgacggcctcggcgagatccagggcattgagggtcgtcgtatcctcgaagcccaggcccccgacgtgatgcaccgccacccggtcgacgagccgctgtccaccggcctcaaggccatcgacgcgatgaccccgatcggccgcggccagcgccagctcatcatcggcgaccgccagaccggtaagaccgccatcgcgatcgataccatcatcaaccagaaggccaactgggaatccggcgacccgaagaagcaggtccgctgcatctacgtggccatcggccagaagggctccaccatcgcctcggtgaagcagagcctggaagacgccggcgccatggagtacaccaccatcgtggcctccccggcagccgattccgctggcttcaagtacatcgccccgtacaccggctcagccatcggccagcactggatgtacaacggcaagcatgtgctcatcgtcttcgatgacttgtccaagcaggcagaggcctatcgttcgatttccctgctgctgcgccgcccgccggggcgtgaagcctacccgggtgatgtgttctacctgcactcccgcctgctcgaacgttgcgccaaggtctccgatgacctgggcggcggttcgatgacgggtctgccgatcgtcgagaccaaggcgaacgatgtgtccgcctacatcccgaccaacgtgatctccatcactgacggccagatcttcctgcagtccgatctgttcaacgccaaccagcgccccgccgtggacgtcggtatctccgtctctcgagtcggtggcgccgcacagaccaaggctctgaagaaggtctccggtacgctgaagatctccctggcacagtaccgttcgctggaatccttcgccatgttcgcctccgatctggatgcggcttccaaggcccagctgacccgtggtgcccacctgaccgagctgttgaagcagccgcagttccacccgtactcgccggaacaggaagtcgtgtccgtatggaccggcacccacggcaagctcgacgacctcgacctgaaggacgtccttccgttcgagcagggactgctggactacatcgaccacaacaccgatatcctcaagaccattcgcgagaccgaggaattcaccgccgacaccgaggctgccctcgataaggccgtggacgagttccgttcgacgttcgtctcttccgccggcaagccgctggtcgagaagaagccggacgttgacaaggccgcgccggtcgatcaggaaaagatcgtggcgggagaaaagtaagccatgggctcgcaactcgcattgaaatcacgcatccgctccaccgagtcgttggcgaagatcttcaacgctcaggagatgatcgcgtcttcgcatatcgccaaggcccgtgatgtggccctgaacgcgaagccgtacaccgatgcgattttcgatgccgtgcaagcgttggtggcccacacccatatcacgcatccgatcgcggtgaaggacgagaagaacccgcgcgtggctgttctcgccctcacctcggatcgtggtatggccggcccgtacacctcttcgattatccgtgaaacggagtcgctgctgtcccgcctcgatgcggcaggtaagcagccggagctgttcgtgtacgggcgtcgcggttcgacgtactacaagtaccgtaatcgtgacatcgcggcgacgtgggaaggcgacaccgaccagcccggcgtggaaattgctgaaacgatctccaacaccttgatggacgcctacatgaagccggctgagaagggtggagtttccgaactctacatcgtctacaccgagttcatcaacatggtggtgcagaaggtgcgcgtgctgcgcatgctgccggtcgaaatcgtgaaaaacgagaccaaggtgcccgatcctgatgaagaggcaccggctactgcggatgtcgctccgctgtacactttcgagcccagcctcgaaaaggtactggatgcgattctgccgaagtacattcagtcccgtatccacgagtgcctgctgaccgcggccgcgtcggaaaccgcaagccgccagaacgccatgcacacggcaaccgacaacgcacgaaacctgatcgacgaccttacgcgcaagctcaacgcttcccgccaggcctcgatcacccaggaacttaccgaaatcatcggcagcgctgacgcgctgaccaagaaggaagagtaggaacgcatatggctgacaaccagaccactgcggccgagcctaccaacggtcgcgtcacccgcgtccagggctcggttatcgacgttgaattcccggtgggtcatctgcccgacatctacaacgccctgaaagtaacgatcgtcaacaccagcgccaaggaagaaggcgaggcgaaggagaccgagatcaccctcgaggtcgaacagcacctcggtgattccacggtccgttgcgtcgctctgaagcccaccgacggcctggttcgtggtgcctccgtctccgacaccggcgccccgatctccgtgccggtcggcgacgtgaccaagggccacgtcttcgacgtgtccggcaacatcctcaacaagaagccggatgagaccatcaccgtctccgagcgttggcctatccaccgcaacccgccggccttcgatcagctggagtccaagacccagatgttcgaaacaggcatcaaggtcatcgatctgctgaccccgtacgtgcagggcggcaagatcggtctgttcggtggtgcaggtgtgggcaagaccgtgctgattcaggaaatgattcagcgcgtggcccagaaccacggtggtgtgtccgtgttcgctggcgtcggcgagcgtacccgtgagggtaacgatctgatcggcgaaatggccgaggccggcgtgcttgagaagaccgcactggtcttcggccagatggatgagcagccgggtacccgtctgcgtgtcccgctgaccgcactgaccatggcagagtacttccgtgacgtgcagaaccaggacgtgctgctgttcatcgacaacatcttccgcttcacccaggccggttccgaggtgtccaccctgctgggtcgtatgccttccgccgtgggttaccagccgaacctggccgatgagatgggttccctccaggagcgcatcacctcgacccgtggtcactcgatcacctcgttgcaggccatttacgtgccggccgatgattacaccgacccggccccggccacgaccttcgcccacttggatgcaaccaccgagctttctcgtgacattgcctccaagggtatctacccggctgtggacccgctgagctccacctcgcgaatcctcgatccgcgttacgtgggccaggctcactacgactgcgccaaccgcgtcaaggcgattctgcagcgtaacaaggagctgcaggacatcatcgccctgatcggtatcgacgagctcggcgaagaggacaagaccaccgtgaaccgtgctcgtaagatcgagcagttcctcggccagaacttctatgtggctgagaagttcaccggtcgccccggctcctacgtgccggccgacgagaccatcgaagccttcacccgcatctgcgacggcgtgtacgacgacgtcccggagcaggcgttctccggcatcggcggcatcgacgacctcgaagagaagtggcacaacatgcagaaggaactgggtgcgtgatggctgcggaaaaaaccacgatgaaggtcaacatcgtcgccgctgaccaccctgtgtggcacggcgaggcgacgagcgtgaccattcccgcctctgagggcggcatgggcatcctgcccgaccatgagcctgtgctcacggtgatcaagcagggtacgctcaccgtggttgagcccgatggcgatcgccacatgttcgaggtgaccgacggattcatttccttcgactcgaacaaactcaccgtggcggtcgagcgcggccacgacgtccagtactccggcaccgccgagtgatctgaaccaactccttaaggggctctctggttttccagagagccccttttgctatgtatgccatgtgttgcgctacagtggtggcctatgcgagttattgttgccgactgttcggccgagtattcgggccgcctcaacgcctcactgcccctggccaagcgcgtattgctgatcaaggccgattccagcctgttgattttctccgaattgggctcctacaagccgctgaactggatgaccgcgccctgcacgattcgtgagatcgacccagccgccaaatccgcgcaacattcccgggaaagtgtcgctggtggggctgtggatggtgatcctgcgacgcgttccccggaaagtgtcgccgctggtgagccggaaaaggtgctacgtgtcagcgccgacaagggttcggacattcttgaagtgacgctgcagcatatctattccgaccaaacctatgatctgggcgaagatccgggtctcatcaaggatggcgtggaagaccatctgcagcgctatctggccgagcaaatcgagcgtatcggcaagggagccaagctggtgcgtcgcgaatacccgaccgccattggcccagtggatattatggccgtgaatgccgagggcgagcatgtggctgtggaaatcaaacgtcacggcggcattgatggcgtcgagcagctgactcgctactgcgaactgctcaatcgagatccgctgctggccccggtgcacggcatcttcgccgcacaaaccatcacgccgcaagcccaggtcttggccaaagaccgcggcttcacctgcctcatcctcgattacgacgatatgaaaggcaccgaggacgacagtctcaggctgttctagatatagcaggggctccctcatcagagggagccccggctatatcttttagtacgcggcgagaatatcgattacgaagaccaacgtggagttggcgggaatcggaccttgctccttatctccataggcctgatccggcggaatcaccagcagaacctgagagccgacggcctggccgaccagacccttctgccagccctcgataacctgatgctggccgctggaatcgctgaacagatcggcgtcgattgtggaatcgcgatcccaggacgaatcgaactgcttgccattcgtaagccaaccggtgtacttgaccaccacggtgttcttgtcggtcagcttggcgccgttacccttgatcagcgtctgcgagatcagcgaatcaaccgaaccctgaccgttcatgtcgatggacggcttgccgttcttggcgcgcgtcaccttcggcagattggccggcacatccttgacttcctcgccagtggccttctccaagtccttggacttggacacaaacgtcatcgccagaatgtaagagtacccggacgaatcctgagcgttgacgccaaagccaatcgtggtgttgatcttggcacccttgatctggttgtagtaggtcgaggagagggtcttggaatccaccttcagcgagcaatccggcgtgttcttggtccaggtgtccatgagctcggtgccgtctttaacgttgagcgcgatgccttgggcgcagacgcggtcgccctcctcgatcacgtcgccatcgcccttctgcagcaccacataagagccatcggacacggtcatcggcgtattaaaggagatggtcggcttctcgccgagcttgcccttggcggtcacgccggcaatttggcccttcttgtcagaagagtcggaagatgaagaggaatcggaagaagaggatttcgagtccgagctcgaactggagcaggcagccagcgacacgcacatcgccagcgagcaggcaagggcaacggccttgccgaagggggataacatagacttaacagacttacgcatgacacatcaccctactggtaaaccttgattttctgcgctcctaggtaataaacaggtgaagattgtagaatggttgagttatgagtgctgaagaacagactacaagaccggataagggcgccaagcgtccatcccgtcatgccaaaatcatgcgtggagtggtgacgcctatcttcggactattggccgtggcggctgtggtgttggggtacatgaatgccacgatgtggaagccctccactgaaatcaccgcttccgcaaccatgagcggctcccggtatgtcgtcactgatccgaatgtgctgaccttgttggatcagaatgccacgataaccgtggactcgggatcctctcaggacgaggcgtgcgtggcgttgggttcgtccaaggatgttgccggatgggtcgcgtccgagaagtcctatacccgcatcaccggattggcatcatggagcgagctgagcacccagaagggaagcagcacgagtcagggagcgcctaccagtgccgatgacgcggtgtcgttcaaggattccgatatgtggactgccgtgaaatgcggcactgggtccgtttcgctgaagagcaagaagaccggcgcctcgacggtagccattgtggatttgggcgaaaatgtcaccaacgccaaggtgcagctgcactgggtgcgctccgaagtgccggactttgcgatgccgttctatctgtccggcggattgctggccgtgctggccgtactgtgcgcctccgtgttcgccatgccgccgcataagcgccgcaagcgcatggtggaaggcatggcaagcgccgtaatcgaggaagaggcacccgccagcatcgcagtgtccgggaagccggatggtgcaagtcgacgtaatcgtcgccgtcacgccacacatcggcgttcgggccgtgcgtcctcgcaatcctcgcaatctgaagccaccgaaacaccggttatcatcgacccaagttcgcgtaacctggtcgccgaccagcagaccggtgccgaaagcggcgctgagcccggcctcagcgccggcgataacgaatcgacttcggtaatcacccctgacgaactgcaggcctacttctcccgcttggcccaagaggtcaataccggagacgactcggccgatgacggacaggaggaaagctgatgaacaagcgatggaacaaactgtgtgtgtccgccttcgcctgcgtggcgttggtcgtgccgttgaccgcctgtgaaggccaactgccgacgccggctgctgatacctccaccaaggttgcgccggatttgaccgaggcgcaggagaagaagattcgtctgaagattctcaagacgatcgatgaagccgatcaggccaagaatcccgatgggtatgcgaccgttatgggcgggccccagctggacattcgcatcagccagaccacgatcaatcagcgtggcggcggtatgtccgaatatgcgaccattcccaaggacatcgcccagacggtgattcctacggacgacggatggcctcgctcggtgttcaccatcacgaccaccaccgaagatcagcagtccaagcgtttgctggtcttcgatcaggaatccgcccagcagaattacaagctgatggctatggctcgactgtttgagggcgccaagctgccaaagttcgagattccgactattggctcgcagatgggcaccgcaaaggatgagaagctggtggccactcccgctgatgccttgacccaatacgccgatgtgctgcagaacggctccaagagccaatacgcttccaagttcgcagacgatttgctgcgccaggaactggccaataccacggccaaggtgcaggaaggtatgcaacgcaacaacggtacgcaggagcaaaaattcaccgctgtgcctgaacagatgtgggtgatgcgtgctgcagacggtgccggtgatctggtggttggccgtattaacggcgaatggactcgcaaggcaggggatggccgcgaatcgcggccggcttccgacgacgagaaggcgctgttcaatagcgacaagtacaccagcaccatgaaggtcacgtatgtgaacgtggtggccttgtacattccgttggcaagttccggtgagcaaatcaccgcagtgggcgccgaccgtcagccggtaaaggtcgaagcgctgtaattgttgccgccacccaccgcgcggttaacgcccccaccacgatgtgattcgtccaccacgatgtgattcgtccaccacgatgtcgataaaattttacctttcgcataatggtgccgtttggggtcacatcgtggtgggcgttttgctacgtggtgggaatttcaccgcgtagtggaagaatccctacgtggtgggaatcggcattacaatcaatgtcagcaaatgtgattgttgttgtacgcgaatcgcgtggaatcgggaggcattatggcagagcagcagttcaatccgggagtctcattggcgggcgccgtcgatttggaggcgctgaagcatcaggtcaaggccgagcccggacaagcgggcggcgcgcctgccgctggtgggtacgtgatcgacaccaccgaaaacaccttccaggcaatggtgcagacttccgcgaccttcccgatcctgctgctcctgtgggtgccgaccgatgaccgcctgttcccgatggcccgtgcactgggcgacgcggtgaacgccctgaacggccagattcagctctcccgtatcgatatctcgtccaatccctcgattgcccaagcgctgcaggtgcagggcgtgcccgcactgttcgcgttgattgccggccgtccgatgccgctgttgcagggccttccgggtgacgacgagctcaagcaacttaccgacgaggtgattccgaagatcattgaggccgccgcgcagtctggtgtgaacggtaccgcgccgtactcgggtgatcctgattccgatgccgccaagagcgctggtgccaccggtgccgtcgcgggtgctgagcaggtgccgccggagcatgccgaagcccatcgtttggccgaggagggcgattacgccggtgccgccgccgaatacgagcgcgtgctcgaatccgacccgtccgatgcactggccgcccgcgaacgtgcgaaggcgctgttgctggcccgctccggggccgctgatgtacgtgacgtacgtgccgctgccgccgcagcgccggacgatgtggaagcgcagttggccgtggctgatatcgacatgattggtggccagattcaagacgctttcgaccgtttgctggactttttggccgccgggcacaaggccgatatcgagcaggttcgcaagcgtctgctcgaatacttcgccatccccgaacccaccgacccgcgtctgacccgcgcccgtcgtcgcctagccaccctcatgtactaagtggttttggctcccctctttgagaggagctgtcatcgtagatgactgaggggagctcacgagcgtactcgattgctccccccccctaaaccatccgattcttcccgaaatactgctggaaccttggcccctccagcgccagctcctcctcgaaatcatccgcccacttacagaacggacggttggcgagaccatcgttattgaatcgcgcctgatcggtgatttcggtgatgcagaatttcggaatcgtcagattggtaaccggcccggatcgttcggcctcggctacgatgagcggcgcattcggcccgccgaacacatccacgctccagccgtcttcctcaatccacacggaataccggttcttgatgattaccgagccgccgcgcttgatgagttcggccgcgatacgcgtatcgatttcgcgctcgacttcgtagcgcgtgccgcccacggacggacctttgacggtgacatatgcttccgagaaccggtcgcggtattcgtccagcacggccaccggatttacgtcgggcgtcatgtcgacgtgaaccttgcgcgagaccagccgcacgcgcaaggcgtaattgtcggcatgcacgtagtagctctgaatgatgagggtcggggcgtcgccgtcgtcgtattccgccggcagttcgcggcagaagaagcggcgttcgtattcgaagtcatctgtaggttccgacataaccccattgtagagccgataatggcgattttctcgttattttggcgacgtatgtgccgcatgcaacgtgatgtggtgtacagtaaagaagttgctcgggtttgtagctcagtggatagagcgtctgtctccggaacagaaggtcgtgggttcgatccccatcaagcccaccagcatggctttcggctaaccgccggaagccttttgcatattcggcgcgtgcaaggctggtgctggtgtcggcaatggcaaggccggtgatgccggctcgcttgggtcgtggaaaaaccgtccggtttggcgagaacggtagccgaatcgtctggaatcgtctggaatagcaaggaatagtctgttgatggccgtatgccgggcatcatgcgcgctaaacgcgactttgctcagtagactgctacgtaatcggcattgccaatcgttgctgatcgtgcgattggtcgtagccggtggtgatgtgtaccggcgccggccgcagcaggtgggcgcccccaagatgagaaggagcacaatatgagcgaaaagatggaagccgtagccacttccgaggcgccggccgcgctgggcgcatacagccaggcggtgaaggccaatggcttcgtgttcgtatccggtcagctgggcattgatccggccaccggcgaactggcgggcgagaccgctggagagcaggctgcacaggcgctgaagaatattaagcacattctcgacactgccggtaccggcattgagcatgtgtgccgcgccaccatctacctgaagaacgtcgaggacttcaaggaagtggacgcacgttacgctgaggtgttcatcggctccgtcaagcccgcccgcgtggcctttggcaacaacatgattcccaagggcgcgctcgtggagattgacgccatcgcggtggagtgattcgaacgttttcccggcggcccgtctgcgcgcatggtgtgtgcagacgggccgccgcgtattgtgcgacgcattcccgggaatgttgcgctggaatcgttgggcggtggtccgtgccacaatagagaccatggcatccaaaggaaaaccgtcgccgcgttcggccgtaagcccgctgagtgatgagcaggtcaagcgtctggccgcccgccacacgcttgtggactcgacacagtattacccgaccggcccccgcacgcccaatcagccggaaatcaacgcccagaatcccaaggccaccaaacgactgctgggaggggtgtccattgtgttccgcgccagctgcaagaccaaggcctggggcttggaacaggtgccggaaaccggaccgttcatcaccgccgccagtcatgtcaccatgtttgatgtgttcgtgccaatgatgagcctgttccacatgggccgccgcccccgttacatggccaaggccgagatggcgaagtggccattgatcggcaagtggttccagttggtcggcatgcagccggtgcagcgtcattcgggcaaggccaagcagatcgaagagacctcgattgatattctgacgtccggccgcccgctgacggtctggccggaaggcaccgtgacccgcgacccgaaaaagtgggtgatgagcattaaggagggcgtgggatatatcgcccttgaatcctcgcgcagactggggcatcaggtgccgctgtacccggcggtgacgtggggtgccgcctccatcaaccactggtggccatggccgcgcaaaaacgtggtgatgtgctatgaccatgcgctcgattactccgatctgcttgccgacatggactcatggggtgaagagccgcctgccgaggccgtgaacgagctgatgtggcgcgtgctcaaacgcatgaacacagtactggaggaaattcgtggcgagcagttccccgctgaaggctactgggactaccgcagcatgagtcgtaagccttggcctgaagccggcggcccgttcccggctgagaagtagccgcaccggttcccgtacggggagcctaggcgagtagcatggcacaagattgtgccgatgaagttgcgcgacaagcgaaggtaggaatttgatatgggtaaaaatataacggttctcggtgcaggagcatggggtactgctttcggccaagtgctggcggacgcaggcaacacggtgaccatgtgggccaaggagcagcagattgtcgagggcattcgcgatcaccaccacaacgccgtgcgcctgccgtccgtcgaaaagttgccggacaacatgaccgccactggggatcgcgccgaagccgtcaagaacgcggacatcgtagtcgtggccatcgccgcgcagttcgcgcgagtggcactcgtcgaattcaagggactgattcccgatcacgccatcgtcgtcagcctgatgaagggcatcgagcgtggcaccaacaagcgtatggacgaagtcgtccgcgaatcccttgacttgccggccgaccggttcgccgccatttccggaccgaacctgtccaaggaaatcgccgatcgtcatcctgccgccaccgtggtggcttgcacgaacctcgataatgccacgaaggtggccgaggcatgcaccacctcctatttcaagccgttcgtgaccaccgacgtcatcggcctggaaatgtgcggcagcctgaagaacgtgaccgcgctggccgtgggcatggcccgtggtgccggctacggtgagaacaccgcagccatgatcgaaactcgtggactggccgaactgaccgcgctgggcgtagccgctggcgccgatcccaagaccttcttcggcttggccggtgtgggcgatctcatcgccacctgtggctcttcgctgtctcgtaactatacgttcggcgcgaatctcggcaagggattgacggtcgaagaggccaccaaggtcagcaacggtgtggccgaaggcgtgcccaccacggatgcggtggtggctcttggcgatcagcttgatgtgccgaccccgttggcgtatcagatgagccgcgtgctgaacgaaggcatttcctgttcggagatgcttgccggactgttcggtcaagaggttaccggcgaataacgagagaagtggcgtatacgttgtacgcgcaaagtcgcgtggcgtatacgtcgttggtgtgcacgagtagactggtgtgcgtctcttgtgcgcggcgttccgagcgcggttcggtccggttggcggtgcaaagcataggcttgaaaacggttgtagtttcaacaaaaggatggttatggccaagaagcgtgttgtggtgctctatggtgggcgtgcagacgagcattcgatttcctgcatctccactgccggtgtgctgggggccatggacactgaacggttcgagccgattccggtcggcatcaccaaggatggcaagtggatcatcaatggcgaggatcctcgtggctggaacttggacggcggcgagctgccgaccgtaaagatcaccccggaatcgcgcccggtgatgcttgacccctctcgcggacaggacggtttcttcatcggcgagcccagccacatcaattccgccgattccggcttcggcaccagcttcgtcagcatgtccgacccggaaatgcaccatgtgctgacctcccttggccatgtggacgcggtactgccggtgctgcacggcccctatggcgaggacggcacggttcaaggcctgctggaaatgatgggtgtgccgtacgtggggtgcggagtgtttgcttccgccgcctgcatggataagcattacaccaaggtggtgctggatgccgccggcattcccaccgcgcccggtgtgacggtcgatgcgcgcaacttcaccgccgccgatgtgcttgccaagatcgaggacgccggtcttgcctatccgctgtttgtcaagccttcgcgcgcaggctccagcttcggtgtgaccaaggtcgagaaagccgatgaccgcgagacccagcaggatcgtctggccgccgccatcgccaccgccggcgagcacgactggaaggtgctcgtcgaacaggggattgatggtcgcgaaatcgaatgtgccgtgctgtgcccgaaggccggtgacgagcccgaggccagctggcccggcgaaatcgtgctcgatcatcagaacgacgaccagttctacgatttcgactccaagtacatggatgcctccgccagccacgtggaagtgcctgccaatctgccggtcagcgtgcttgaggacgtgcgtgacgtggcccgtcgcgcgttcaaggccgtggatggtgccggcttgagccgtgtggacaccttcgtgacgcctgatggcacggtgatggtcaacgaaatcaacaccatgcccggcttcacgccgatttccatgtatcccaaggcttgggatgccaccggagtgagctacaccgaactcatcacgcgattgattgagggcgtgctgaggtaagtgtggtgcggaatcggccgccaaggaagagggcgcgctgaacgtcatcgcccctccgcacgactggtccaactacggcgaggtcatcgagggcttcaagaagaagtacccggagatcaaggtcaccgagctcaacccgaacgcctcatccaaggaagagctcgacgccgccaagaccaacaagggcaccgacgccgcccccgacgtcttcgatgtcggccagtccatcaccgccacctccaccgactacttcgccccgtacaaggcgcagacctgggacaagatcccggacgggcagaaggacgccaatggctcctactacgccgactacaccggtatcatgtccatcggctggaacgccgacaagtacggcgacatcagctccctggacgacctgctcgacccgaagttcgccggcaccgtggccctcaacggcaagccagccgaggctggcgtcgccttcaacggctacctgatggccaaccagctcgccggtggcgacatcaacaacctgcagcccggccttgacttcttcaagaagctccaggaggccggcaacctgaccaccgtcgacgtgaccaacggcaccatcgactccggccagaccggcgtggtcttcgactggacctacaaccaggcctcctacaagaaggagctcaaggacaagggcgtgaactggaagtacaagaccttcccgaaggcccaggtcgtcagctactacaaccaggccatcaacaaggacgcgccgcacccggccgccgcccgcctgtgggaggagtacctgtacgccgctgacgcccagaacctgtggttcaagggcggcgccaacccggtgctgctcgattccatgaaggaagacggcaccgtcgaccaggccactctgaaggacgccatcaccatcgaaggcgagccggtctcctacaccaacgacgactccacccgcatcaccgagtggctccagaacaactgggacaagacgatcggcaactgagacacagaccgatgaccgccgcaatcgcacccattgcatcgaacggacctgccgccgccaaggccgcgggtccgtccgctactcccacttctcctctctcctcgacgatggccaagcaccgccaggagctgggcacgctcgcctgctgaatggcgttgcgatgatcgtgcggttttgttctgttttgtgactgtgcaatcgtcgaatggcttatcggcaatgatgtgtgtggggcggcggcgatttttgggcgattatcgcgtgccgtcccacgccggtgtgggatggcatgaacgtcaaacgatgtacattcgtgccgtcccacagaatgtattgaggaatcgttgcaatgacgccatttctccgttcagcgtcatcagtcatatacggagcggcgtgggccgccgcgaaaaaatcgggcaaaatcgcgtgccgtcccacagcaatcttgcagagtaggggactttctcggcattgggaatgattgacgttgatcattccttgcccattgatgatttcctcccccattcccaatgcaatcgaaacgccgtgccgtattcttgaagagtattgcacgtgtgatcggtccgtttgcggccagtaactatgggggataagtatgagcgaaccaatgccgccggcgcagcaacctcagcaaccacagcagccgcaacaaaccccacgcgattggtggttcacggcccatcgccggttttcgacaatcggctcggcgctcgccattatgatggtgttctggatcggactgaatattctggccactgaagcgctacgaacgctgcttggcaccgatgtgcccgcttgggctgtgctgctcgcctcctccggaccgctgtatgtggtggccatgccgctgagtatgttggccttcactcgcgtaccggttattcgcacccggcagtaccccatgaaggcgggggagttcattcagattttcgtcatgtgcattccggtaatgttcttgggcaatatgattggcaatatattgtctgccggagccactgatggtcaggccaccaatcgcatcaacgacgtgattcttggcagcgactggcggatgaacgcattgttcataggcctgttggcaccggtttgcgaagaatggatttttcgcaaggagattatctcccgcctgcgccggtacggagagaagaccgcaatcatgttctccgcattggcattcgcgctattccatatgaacgtgttccagttcttctacgcctttggcctaggactgatgttcggatatgtatacacacgcacctcccgactgcggtattcggtggctatgcacatgctgatcaacctgaacgggtcagtactcgccccattggtgatacaacagatcgatccccgcatcctcgacggcacggtcagcgaggccgaaatcatgcgtatggctgaaaccggcaacatgggcggcatgggcatcatgatgttgtacggcacagtgatgttgggcctctgcattgccggtatcgtgctgcttatcaccaagtgcaagagctgggagttctatcttgcgccagaggagttgcctgcggggcttaaaatacgcaccgcctatgccaatcccggcgttatcgcgtacctactgttgactgtgatgcttaccggttggatgctgttcgcatgactgtcatagccggacccagagaggcgagccgggagatatcacagattgcctgacgagccgccatcttcaacaaggtattcggtgcccgaaccggcgatggctcgcgccgccatatctttgatggtggaaggcagcacaccctcgcgcgcgaacacaagcacttggccggtcatgccgtaaggggagaagccggtgaacttgaccaatggcggctgaccctccagcgccacgtcggcggtggctttggttacgcggtcgagaatatcctgactgatcgcagacgggtcgccggaggtcttggccgtgaactcaagcgtggccatgccttcgctgaccggcgtaagcttggtcagggcggccgtattgagtaccgaattggggatgaccatcatgtctccggaacgggtgcgcaccacggtctgacgccaggtgatgtcgtgcacggtgcctgtgacgccttgaatggtcaccagatcgccgggttggattacgcggcccagcatcaggccgaagccgccgatgatgttggcgattgtatccttcagacccagcgagatcgccacacctccaacaccaagggcggtgataagtgtggtcggattgatgccgaatacgggctgcagtaccatcgctgcgccggtgacccagatggtcacgcgcgtgaggttcacgaaaatcgaggcgctgggaatctgagaattgtccagaatcttgcgcaacacgcggctgatgacgcggtcggccacaaatacgatggccaatacaatggtcagccagatgagtttgccggcgttcacctgaaaccagcgtgcgatgtcttctgcatattcagtcatacgcctactgtatcggtcgtttctggtgaagtcgtggagacggggtggcagaaagcggaatcggcctacggtcgattccgttactcctggtgctcgcggcaggtctggccgaggccgcgggccagtcgaatcggatcgagaatctcgtccaactgctcggcgggcaggtcggtgcgttcgccggccacctcgcgcacggtacggccggtatgtacggcttcggcggcgatgtcggccgcgtgctcgtagccgatgtaatggttgagcgcggcggaaatcgacggtgaggactgggcatatgaacgccccaggtcagcattgatttcgatgccttccacgcagttgacgcggaacgtctccatggcgtgcgtcagcaacgccatgccggtcagcagctcatgcaccatcaccgggtcgaaggcgttcagctgcaactgtccctcggccacagcccagttcacagtcacgtccatgccgaagatcgtgaaacagcactggttgacgcactcgggaatcacagggttcactttggccggcatgatcgacgatccggcctggcgagccggcacgttgagatcgttgaaaccgcagcgcgggccggaattgagcagtcgcaaatcgtcggcggccttcttcaggtgcacggcgaggctcttgatggcagccgacgtggccacgtacgcgcccatatccgtcatggcggccaccggatcgggcgcggcggtgaccggcagcccggtgatttgcgccagatgcttgatagcggacttgcggaatcgcagatccgcgcaaatgccggtaccgatggcggtggcaccgaggttgagctgggccagcagcggcaccacgcgatcgaatgcggccaaatcagacttcaacagcgtggcaaacgcatgaaattcctgaccataggtcattggtacggcgtcctgcagctgcgtgcggccaatcgtcacgtcattgatatgtttgtcggccagatcgtggaaggccttggcgagtttcttggtggactcggcgagcggcccgatcgcgtcaataagcgcgagtttgcaggcggccgggtaggtgtcgttcgtggactgcgacttgttgacgtcgtcgttcggatggatgtatgtgtaatcgccgcgctggcggccggcgatttccaacgcacggttggcgatcacctcgttcatgttcatgttcgacgaggtgccggcaccgccctgcatcacatcgaccgggaactgatcggccagtttgccggcctcaatttctaggcaggcggcgcgaatggcctcggccttggctgggtcgatcaggcctaattcctcattggcgatggcgcaggcgcgcttgaccgtggcataggcgcgaatcagctcgggatgttggctatcggtgatgccggagaccgggaagttgccgatagcgcgctgggtgtgaataccccagtagacgttcgccggcacctccatctggccgatgcagtcatgttccagacgggtcttgttcgatgtttcgctcatgcttccatcttcctgtgcgtgggttggaaacgccagcatgagaggctgattgcgccttgtgagaaacctcacgcggggttcgtgcggcggaaacaatccagactcgctggttttcggtcaagcggtgtacccggggaatcctgcggggccgttcgacgatgagatggtggatggcgcggcatgcgtggcggcgaccgacatgccgggggcggtcgaatcctgcgcattgtgcacgaagatgcgattccagtaattaagcatgtccttttggctcatggccaggtatatgcccatggccagcacggccacatcttctttaagcaggtctttgatttcgatggtgtcgctcaattcgggccaacgttgcagcacggcgagcatgccgcccacggtgaactcgaccatgagatcggttttcaggtcaaggttcttggggtcgcgttgcaatgtgctgagcatttgcagacggcagaagtcgcgcagcgattcggtcagttcaagcgtgctgtgcgggcctgccaacagggccaggtggtcgaggcgctgacgctgctctggatcggagagcgtggcggtgacgcggtctcgccattgttcctcgggattgccgttcggatcgggggtgcggttgatcggaatcgattcgacctgatgcaggatggctgaatcggccaattcgggcaggctggagaagtgatagtagaacgaattacggttcacgccagcctcacgcaccacgtcggtaacggtgatcttgcgatagtcgcggtcggcgagcaattcccagaaagcgttctcgaggcgttctttggcgggcagcacctcggaatcatggcgtggacgtggcatctcttcctcctgatgcaccagcgtgatatggtcacgctgtctaataacttattgggcagtataactattatttgtggacatgtctatgagctaatcggcgatttcagttgcgtcctccgctgatggcgaagctgtggtgccggcatcggcatcagtatcggctctggccggagctgcgctatctgctcctgctgcagtttctgctgggatctcggctgttgctttggaggtcgcagaacttggtgcggaagccggggcgggcgtcggcttgcgtttggccgtggacgccttgaacagtatcgccagggcctcaaccaaatgacgccggtctgcgggggtcagcccaacgtacgcgccaagcatcgccggaatcgaagcggggaagttgctcatcacctcgctgaagctggtggcgccgttggcgtgcagcacggtgaacagcgcatccaccgcacgctcgcgctgttcgggcgtaagcgtggcgatccaatggttcagctcctcgttaaacaactgcgagctggaactcaaatccggctcggtgatgaactggtcaccatccaatagccaggtgaaggcggaatgctgcatgatgccatccgaatcggaagagaccacgcggcaaggctccggggtctcgaaaatcatgcccacaatcgacgaactcggcacgattttcgtcaccttcggctggatggtgcggtaggcggggctggtcacaatctccggcgggaaaccggggccatccagtgaatagacatgctgaatgcgcttgcgcaccttgggatcggcgttcatggccgcgtaaatcgccagattgcctcccttggaatggccgaccagaataatcggaccctcccacagtcgcgccaccatatccagataggcgctggctgaacgttgcgccggcaccggatactggaaagccatattgaaatcttccttccatccgatgagcgaatcatcggtgccgcggaaggaaataaccaacgtgcctttgtaggtcggcttccggcgcttgtggccgtcggacagttggaaggtggcggcggcgaattgggtttgctcgccctgattgatgtgctcgaccaccgcgcccaggcgaacgttggcgtagcgggggttctcgcctgcggcctggaacaggtcgtgggtcaggtccgggttgaccactgaaaccatttgggcttcgtgcggcttgtcgtcggcatgtgtttccggcgaacgatgcagctcgcggttggcctcgtcaaggcttaccgattcaagctcgggatgccagatacccttcagccagatcagtggatgcttgggttcgaaagcgcgaatgcgtgcggcgaacgagcctgaccgcgtctcatccagcatcaacgtcggacagacactggccacatcctcatagatgagcgtggagatgatcaaggcgtcgatttcgttgaacggcaagtcggcgaaggagcgcgtttcggtgtgcgcgtaatcgataatgccggtcatgcgcacctcctgcttccgttgatattgcatatccccttgggctgcgtggtcttgcgatcgcgtgcggccgtgcggctgcgcgcagcaattaaccatatgcattccattgtagggattgtacggttttggccggcgcgatcgagcaagactgcaccgacggcgaacaattcgtggaaggattcccgtcggcttgtcgaaaattgtcgggtagcagggttgcgatgccagccagccgaccaccctccggcgctacgcgccatctcccgccggcgggagggttaaccactcaatcctttttgacgaggcggaccgctgggcccgtcaaaggttcggcagatcgaagcgcgccagatccacgccctcgagttcaagcaactcggccttgatgtcgagtcggccgccgtagccgccaaacgcgcggcccgagccgactacgcggtggcagggcacgatgatggtaaccggattgcgcttcactgcgcctccgaccgcctgcgcggccatgcggccgccgccgcgtcgttcggccaattcggcggcgagttcgccgtaacttaccgtcatgccataggggatttcggccaccagattccacacttcatgttggaatggcgtgccggcgggatgcaaaggcggcacctgatccgagccggggcgttcgccggcgaaataggcggtcagccattcgcgggttatacggaatacgtcgggttcactatcggattcgcgattcgaatcgagaacggcttggtgatcggtggcccaccaccagtcttcaagacagagttcggtaagtccctcgccgtcggaggccatcatcatccggccgatgggcgtttcgactgtggcccgcatcagttgtcgttgcgtcataccgccattatcgcgcgttgagggatgaagcccataccgtgcctgatttcatgaaggacgggtcgtgctgtacggtcagtattgcgtgctgggcagcgatatctgacatagtgggggttcttgggccggcatgagtgttctttccgacatcccaaccgtctaactccgtttcgaggggctgatttgggctgttccggaggtctatctccgtttcgaggggctcctcatccgggaaaccacaagtataaacggctccgggctaacgtcattacgccgtttttggcccgtgtctactcagccaccagccccttgaaacgggagtagacctccggagaaggccaaatcagccccttgaaacgcagcgacccctctgattggagtcaatcagaggggttcggcacattgctgatgcagctggtccgccgtccgccttgaggcggaacgtaaccaagattcaggcgggattactccgcaacgagcgccaggaaggcggcggccacggcggctgtcgggttcgggaattcctcgtcctggttgaagaacggcacgtcggcgtagttcaggaacttcacttcggcacggtcgccgatcaaggccttggcctcttcggccagctgatcggttatcgtcatgcgttcctgatttccacggccatggccgtgcaatgtgcccatcgcttagttctacccgctgtttatgctggccatgcccatcgcttggctgctgtatacggtcaccgcgagttatgtgcacggcggcacccgataatcgttggaaaaccggtgggacacgcgggggcttggctttttcctgagattggcgtatctttgtcatctgttgcccgtgaaggtaacacatgcggacatagcttagttggtaaagcgcaaccttgccaaggttgagaccgcgggttcgagtcccgttgtccgctctcggatggctggttcaggatgattgattcagcctgaggatgacccgggcggttggcgcagtggtagcgcacttccctgacacggaaggggtcacaagttcgaatcttgtatcgcccactcgatgaatcgccggcagaatgttgccggttttttcatcacaagctcgggcgattggcgcagcggctagcgcacttcgttcacaccgaaggggtcgtaggttcgattcctacatcgcccacccgatatcacgctcgtcagtctatgatggcgggcattttctatatctgccgtgccacggttccttatatggcgtccggcctcgggtggcatttggctgtgagcggtttccgattatgagtggcgtccggccgtcgtgcaatcccgctgcgcgcggtgccgtttgggctgtaatacgggtgctttgaaccggccataacttcttcatatgtcccggggcttgtgtcgtgtgccgcggcgcgcttccatagtggatatggcggtgcggaaggggagccgccactacttacttacacaaggacgtcttggtccgccagggcaacgcgcatggaaaggggtttgcgatggtgtgcaccacgctgaatttcgcggagaaatacctgctgaaaaccgaagtcaggtccgttgccggtatgtccggcggtacttccgatgctggtactgatttcgatgtcgatctcggtggcgagggcgacctcggaagcgatcatgccaccggtttcaatcgctcgctatcggccgacgattattgggctgcagccggatatgccgatgagtcattgtattgatggacgtgatgacgcggtaagggcgcgtcgataagtgcggctggtgtcgcggctgatgccgcatttggtgctcgttcggtggtcgcggctgatgttccgtacggaccgcctgcaatggttttgcatcggtggtgcgtcaaaatccggaccgtcgccgacgctgttgacgtctggcggcgttggagggacagataatggattgtcaacgccgctgagaacgattggcgacggtggtgggacagcggatgccccaccaccgtcgccaagagtggtacttgtgtcggtggcgtccaaaacatggcccggcaccgacatcagatactctgaacgtcggcggattcccgttctgtgtcccagcgccgacgtttgattcctgcttatgcgagctggcgtcggtaaaaaggcagaacttggttcaccggcgatgtctcagcacgtttgcgcgcgtcggatccttctggagcagcaggaaaacgagcgccacaacgagcaggacggcgatggacagcacgccgaacgaggcgttgccggtcagggacgtggtggtggctaccaggaaggtgccgatgattgaggccgttttagggaagaaacaatagtgagaccggggaacccttgaaatcattggggaatcatggtggcgatgcatgcgattaacacatgttgttaacacagatgtggaatgaggaggcgcgtaaggctcgtggtctgcgacgcatgagtgtgaccgtgagctccccagctgatgagcgcaaaggcagagattggtttcacgcgggacttgtctgccgaagagcggcgattgatgcagggtctgtgcgatgctctgcagcagttgctgaacaagcagtaccagcggcacatgtgggactgttcgatagcctgaaaaattttgccgcagacaatctaggcaatgtgcttggcggggatttcaatctcggttcgattggtgatttgccggcggtaatcggtgagcatttcaatgccgatcagttgggtgaaatcaacaggtcgttggcgaccatttgaacgccgaccgacttgacgagctgcaggcgctggcggaggaaaacatctccgccgaccagatcagtcaggtcgctggcgcaattcaggagcagggtgccaatctggacctcggatccattgccgaacaagcaggactgcccgctgacatcatcagccagatttccggactattgggcaagtagtcgccttaagctttaacgctgacggtgttgtctcggctattgcgtgttttgcggtcgctcagcaaatcatatgggtcgtgggtaaccgattgcgagcgctgctgtacacagatgtgtacgtgggtcgaagcggattcgtggtggcaggtgagacaagctgccctcgcatggctggaaaagcttcggtctcgtggagtgcgatgttaaagctgctcaggtcaacggaatggcggaattccgccgatgcaacttgtggttgcgctcgaataaccggcgattgcaacccaaagatggtggcgggtgacatggacggcatgccatagtgagcccatcggccgaacatgacatgataaagattacgtatgaagggacattccaatgagttttcgcgctaacctgcagtacctacgtgcgcaacgcaacctgacccaggaacgattggccatgttgcttggcgtctcgcgtcaggccatttcgaaatgggaatccgaaaaggcctatcccgagatggacaagctgcttatgatctgcgacctgttcggctgcacgcttgatgatctggtacttggcgatgtgagtcggcctgccgcgtcggcttctgcggccggttcgtcgaatgttgactcctcggctgagacggcatcgcctttagccgcttcttccaaaacggcgggcataatcgctcctatcgcggagcttgcgcaggatatcactggctacgatgaacatcgccgccgattcgcgctgctgattgccggcggtgttgctgcgattgtcgccggggttggcatcggcaacctgttcgattccaacaattccattctcggagcgacgccgctcaacgattttctgacgtttctgtgcgtctgtgtgggtgtgattgcggggctggcgatgctgattccaggaggtctgtcgcgtattgacttcaaacggcgtcacccatacgtagaagatttctacaccggggaggaccgcagccgagaattgcggctgctggtaatcggcatcgtcggtggcatctcggctattctgattggcattgcggtgacggtgtatgccgatgacatgctcggcgtctccgatggctggcccaacgcaatttttctgctgctctgtgcgcccggtgttttcgggtttgtctactgcggcatgagatacagtctgctcaatatcaacgcatacaacaaagcggccgaggacgaccgcaaggagcatgcgggtgagcaggatgtctacgtcaaactgaccggtgcggtgtgtggcatcatcatgttgatagccacggtgatcggcctgtgcctgctgtttttgaaccctgcggcattgcgcggcgattggtcggccgttgggtcaagcgccgcggatggggcgatgttctggctgccgtggccgattggcggtgtgctgtgcggcgttgcggccctcgccattcagctggtcaaggattatcgcgagcgcaagtgatcaagcggtgatggtccatcgttattagggcccgttgcaggggttgcgagatatcgcccgcggcgcagagttgccgaggactggcaaatctttgccacaatgtcaagtgatgaattcaaaaaataaaaaaatcgcccgaacggtcaaaaaccattcgagcgaaatacgcaaagtcatcgaaattgggtagcattgagttatctgaaagattgctttgttttgtttgcaattttcaccagcgtcagcataactggcacctccgtcagtacgccgaccgttgttgcaagtgccgccgggctggtagtaccgaacagagcgacagcaaccgcaactgataactcaaagaaattagacgcaccaatcatacccgcaggggcggaaatatcgtgcggtaactttaacaacttgcaggctccataggcaataaagaaaatcaaaaatgtctgtaaaatcaacggcactgcgatcagtatgatgtgcagcgggttttctaaaatgacttcgctttgccccatgaaaatcagcaccagcgtaagcagcagaccaatcgtagtaatggaatcaaatttgtgaataaacacattttcaaaatactctgttcccttactgcgggttacaaatacacgggtcaaaataccgcctgccagtggaataaccacaaacagtattacacttaaaatcagcgtatcaaagggaacactaacattggaaacgcccaacaaaaattttacgataggcacaaaagcaatcagaatgatgaggtcattggtcgccacctgcaccaccgtataagctggatttccttttgtcaacgtactccatacaaacaccatcgccgtacaaggcgcagcccccaaaagcactgctccggcgaggtattctaccgcaaggtcaggcgtaataaatgccttgaaaatcacgaagaaaaacaagctggcaatgccatacattgtaaaaggttttataagccagttgacaatccatgtcacaaacaaccccttcggattttttcctacatttcgtacactgttgaagtccactttcagcatcatgggatatatcattacccaaatcagaatagccatcgggatagagacacgggcatattccagccgagccagtaatgcagggactactggggcaaaatgccccagcaatacgcctaccaccatacacaggaatacccatattgtcagataccgttgaaaaaattgatccccggatcagcttcttttttcaaccataaacacctccttcaattcgtatttttaaccgtataatgtgcccctcaatttgactgattatttcccggaacgcttcatccgggcagcctgtcgggtcatttagtccccagttatcgtcaaaagctctgccaatatagggacaacccacatcacagcccatcgaaatcgcaatatccggttccgggatgctgtcaaaggttttactgtattgggactgttccatatcaatcccatacagctctttcatcaagcggacagcatcctgattgatctggggcttggtttcgcttccagcagaatagctttcaaacacatcggaagcaaaatgcttccctaatgcctctgctatctggctccggcaggaattgtggacgcatataaaagcaactctctttttctccacttttagtaccccaacttatggatcagtttttccacatcagcagctttcagcacctttcccatagacaccactttttcattgaccaccaacgcaggcatagacattacaccgtaggccataattttctccatatcagtgatatactccggttgaatagacaaccccatattgttcagtgctgcttttgtgttctccagcaaggcatggcaattcttacatccgctgcctaaaaccttaatacagcaaatactgttgcttgcctcatcgcagcagctaccgtttacagtctcggcctcatacgtttcacaagctccattgcaagcacaagcaacagtctttcctccttcctcttttcttttgccaaatccgaacagtcccataatagaatctcctttcaaattttgtatggttacaccttatccttgttaaatcaacagatgctgaaatacgttaaacagataacccacaatgacaattccaagcgtgcagattacgatgaacagtcctaacagttttgcttttaccgcttttttcagcataataatggacggcaggctaagcgtagtgacggccatcataaagctgaggattgtaccaagctgcgctccttttgcaagcagggcttccgcaacggaaatcgtgccgaaaatatccgcatacattggaacacccaccaacacggctaacacaacaccaaatggattgttgcttcccaataccgtctgaatccagctttccggaatccagttatgaatgattgcgccgataccaacgccaaccaaaatatacgggaacactttcttgaaagtctcaattacctgttcctttgcgaagatccgccgatccctcactgtcagtgcatctgattcaacatccacgctgtttgcattacggatgaaatcttccacgtagttctccatgtgcattttttcaatgactgtaccgccgattactgcaatcaccaagccaactaccacatagacgattgcaatctttgccccgaaaatgctcatcaacaataccaaacttcccagatcaaccatcggagatgaaatcaggaaagaaaaaagttacgcctaaaggaagtccagcgctggtaaaaccaataaacagcggaatagaggagcaggaacagaacggtgttaccgttcccagcagagcagcgatgatatttgcccagataccatgaaaacgtcccagtatccgtttgctccgctcaggcgggaaatagctctgaatatatgagattacaaaaatcaagacacaaagcagcacggtaattttaaccacatcgtaaagaaaaaactggatgctcccacccaagcgggatgttgtgtctaacccaaaaacggataaaccatttccaattaccgtgttcagccacttcattccaagcacctgatcttgaatgaaaagccacgttaatcgtaaaatctccataaggtatgtctcctttcaaattgataaattcaaaactatcgaaatgttgtccaaaagagaagccaccctttacagatggcttattttacctacagcaacttccgttttgctcatcatgaggaactaaagataattgttgctcaagcaattttttagcacgctctgcgccttcgggattgatggagtaatgaacccatttcccatctttacgcccttgtacgatgtcggcatcacacaatattttcatgtgatgggaaagtgttgattgtgtaatatgcaaatcatcaagcaatttgcaggcgcatttttcccctgtgcggagcaattctaaaatctgtaaacggttttcgtcacaaaatgctttgaacacctttatggtctctgtgtatgcagatgccacgaatctcacctcacattcgctgttttgaacttacatcctcattatattcataaattcaaaaatgtcaatatgaattttgcgaaaaacggaaagatgaacaagctgtttttcaagccagcgtattgacacacaaaaaataacccctccctgtcaagggaagggctatcacagtactttattctgttatttccgggatttcactcccgcgtcgggtccttttgcaggagcaggaaggccagcgccacgacgagcaggacggcgatggagagcacgccgagcgaggcgttgccggtcagggacgtggtggtggccaccaggaaggtgccgatgatcgaggcggtcttgccgaagatatcgtagaagccgtagtactcgttggcgtgatccttggggatgatcttgccgtagtacgagcgggagagtgcctggatgccgccctggaacatgccgaccagaatcgccagaatccagaactccacggacgacttcaggaagaacgcggcgaagaacacgatgcacatgtatgccacgaccgccgccgtgatcatcactttgcagccgaaccggccggccaaacgaccgtagagaatcgcgcaggggaaggccacgaactgcgtgacgagcagtgccaccaccagctgggtggagtcgatgccaagctcggcaccgtaggaggtactcatcgaaatcaccgtgttcacggcatcgatgtagaagaagaacgcgatcatgaacatccacaacggcttgttcttcacgattttgccgaacgtgcccgccagttcgctgaacgtgccgcgcacggccgagcccagctggtcacgggtggcgcgatagtgcacttggcggtagctggtaagcagcgggatggtgaatgccacccaccagatggcggtgatgatgaacgaggcgcgcgtgcaagccaccgtggaccagtcgaagagcgacgggccgccgaagatcagcgcgatgcagaagatgaacggcacggtggagccgatgtagccccagccgtagccatgcgaggagaccttgtccatgcgctcgttcgaggtggcgtcgatgagcatcgaatcgtagaacgttagcgagccgttgaggccgatggtcgccagaatgtagacgactaggaacggtagccaggtcaggggcagggccattgcgcagcaggtgaccacgccagtgccgaagaagccaaggaagaacttgattttcatgccttgcacgtcggcgatggagccgagcaacggcatgagcagcgcgatgaccaaggaagcaatggtttgcgcgtagccccaggcggacacgatgttgccgtccgccggcatcagcgatttggcgtaaatggggatgacggcggtggacagcagcacgaatgccgagttgccgacgtcgtagatgatccacttcttctcgcgggcggtcagtttggcgctttgcggcaccggttcgtggacattcgtgggatcagtcatatacactcctcgacagtattcaactcaatctatcgtagaagcgcggactagggtaggggagccattccggttgaacggcggatgaataatgccgggcctctttctaaggggagccagagcaaaaatagctcccctcgctgaggggagctggccgcgaagcggactgaagggagccgatcgtggattcccccagatgaggaaatccactcaatcgtccggaaactattcgccgatcagcgcgatggcctcgtcgtaatcggggcattgcggcacgccgttgaggctgcgctggatggcgatggatgccgccgcgttggcgatctttaccgattcggccagactatggccctttgccagcatcgcgcacatcacgccggtgtggcaaccgcccgccgaacgggtgtgtacggccttggtcgggtatccctcgatatgaatcgtctcgccacctggctcacgaatccaagcgccgcgggcgccgacacgcaccaccagcggcgcgcgcagtgtagtgcccaagccgtcacacaactggtgcataaagtcgtcgagtccaccgccgatggtgaccttgctgtcgtcgatcggcgcgcccaggcgctcggccagcgtcatggcctcctgacggttgcaggaccagaccgggcgtgcgagcaccaggtcctcaagcatatggtcgttgaccagacgcaacgtattggtgggattgatcaccagcgtgtagtcgcgtgcagccgggtcggtaccggccttgagcaggaatccgtccacgccggtggccgtatggtccatcagtgtgttgccgctgatgtgcaccacgtctttgggctgcggctccagcgtgttgaacgtgtccgcgtcgccatgagcttcggcgccataggaagcgatgaacgtcttcttcggcgcgccggagctcagcaccacgcggaaaccggaatcctcatcaagacgatcctggccgatatgcgtgatgccgttgtcctggaatgactggcggatgaaatgcgcccacaggccgttgcccagaatgccggcgtgctcggtcggcacgcccatgcggctggccgcctgcagcacgcgatagctgccgccaatggagggcttcggatgatcggccacggcgaatccgccctgtgccggcacctcgtccacattgagcataatgtccacccagacttgccccagtgaaatcacgctgggctcgtgagtgccgatacctcgcctgagattcaacatgacagcctccttcgtcgtaagttgcacgaggaccccttcgtcccttgccatctcttataccgagattatatgagagtttgctggatgcggaataggcaggccggcgtgttttatcaggtaaacgctatgatttgcggcgtaattcgccgctggcgaaccaatgtcgaaccgctcgcgaaccgctgatggcccactcgcaagttacgctcgaaccgcgcgtgaaccgccgaagttcgcccatgatacacgcaagagttgcggttgtcggtattgggctatatatttgtgaagttgtgtgttcggcatgtcgggtgaaaccggcggtcgaatgcgtgaaagacttgacacatcaaggttaagggagtccatcatggcagctcgttgcgcagtgtgcggcaagggaccgcagaccggtttcaccgtttcccattcgcaccgtcgtaccaagcgtagcttccgcccgaacctgcagtctgtacgcaccacgattgatggcgagaacactcgtctgcgcgtgtgcgtcaagtgcctcaaggccggcaaggttcagcgcgtggccgcgtgaatcgcgtactaacgtggagcaaaacccgtttgagcttcggctcagcgggttttgttgtttctgcggcctaaagaggccgtgcgaatagaataggccaatatgagcatcactatggacaccactctcgcttcgctggtcaccaacaagcgtcgcgtgtccgcgctcaaatcgctgggaatcgtcactgtcggcgacgccctgacctactatcccttccgcgtcaccgaaccggtgccgcttcgcgccatccgcgaggccgcacccggccagcagatggcatttgccgccgtgatacgagacatgcgcgtggtgccgatgaacgctcgccgcggctaccgactcgaggcgacggttgacgacgccgactttgcccgttcgcgtcgcgtacccggcagcacggtccggctcacgttcttttcgtatcgtaaatcgtatgtggattgggtcagcatgcggctgcgcgccggcacgtctgtggtggtctccggtatgcccggcgaatacatgggtcagctgcaattcactcatcccgaaatcctcactgtcgcgcccgtgccggccggagcaggagcggggcttgagggttacgctcggggcgcggcatccggcaatggtgcgtttgcgggaagtgccgatccgtatgccagtgtgcagtccgcgtatccgccggccgcgactgcctcttccggggccgcgtcgaaatacgacgccgataccgtgcaagaggcgcttacccgcgtctgccggccccgcccggtatatcacgccagttcgcgtatttcatccgaacatattcatgagacgattctgggattgctgtggatgatgggggcccgcacgtcatccacgcctgacgggcaactcgctggcgctgggtcagccggcattgtggctcccacgactgacaccatcgccgtccaaaacggggaagagaagtccggcacgaccgccgaatccggtgctgaggcgctctcccaatccatcccagatgtgctgcccgaatcggtgcgcaaggccaagaacctcatgcatcgggctgaggcgttcctggccattcatgatccggcctccacggcccggttcaaggaggccatcgaaaccctgcgctatgaggaggctttcgtttcgcagacctcgctgctgaaggctcgacagcacgcgcacaagtcatcggcgcatccttgcccgctgaacgaggcgctggaaacagctcgagcgtcggtgggcgaagcggccgcggagccaagtacgcaaccagaagcatcggagcgcggtgctgcgaccgatctgcctgatctgcccaatttgcccaatttgcccaatttgcgcgaccgcttcatcgcatcgttgccgttcacgctgacagccgggcagagtcaggtggtggacgacatcgcgtccgaccttgaacgtgactggcccatgcaacgtctgttgcagggcgaagtcggctccggcaaaaccgtggtggcgctcgcggccatgctgcaggcggtcggtgccggctatcaggcggtgctggtggctcccactcaggtgcttgccgaacagcattacgagaccatcagcaagatggtgtcggggctgacccttgcacagccgggtgccaaggagaccgatgccgcggccgacgttgagggcgcgatgggcgcgtccggtgcttcgacggtctcttcttccaaggtgcctgcggaaattcccgtcaccctgctgaccggtggcatgaagcttgccgcccggcataaggcgctcgctgcggccgccagtggtgagccgggcattatcgtggccacgcacgcggcgttttccaagaccttccaagccccgcacttggccttggtggtaatcgacgagcaacaccggttcggtgtggaacagcgcgaaagtctcaacgccaaaaccgatgacggcaccacgccgcatctattggtgatgaccgccacgcccatcccgcgcaccgccgccatgacttggtttggcgatctcgatatttcctggctcaccgaattgcctggcggccgcaaaccgattcgcaccgtggtggtcaatgaggccgatgccgccaccatgggccgtatgttcgcgcacattcgcgcgcgagtcgacgcgggggagcgggcctatatcgtgtgcccgcgcattgatgcggatgatgaggagaacgaaggcggttccggcgtttcggcagcagccggttctgcccgcggacgcgccgcagcatctggttccagtgcccgcacagctgcgggcggccgtgcaacgcgcgctgcgctcgacgccatcggcatcgacgacccctacgaaaccttcgacgaaaatggcgaaaccgtggctcgcccgccattgcatgcggtggccgaaatcgccgatcggttgcagaaacttccacagttccaaggcatccgttttaccaccttgaccggtcgggacaaggatgatgtgaaaacccaggtcatggccgattttgccagcggcgagactccgattctggtgtccaccacggtgattgaggtcggtgtggatgtgaaacaggccagctgcatcgtgatctttgatgccgaccgatacggcctctctcagttgcatcagctgcgcggccgcgtgggacgtggtggcaccaactcgtgggcgttccttatttcccgtgcggaacccggctccccggccgagcaacggctcgaagtgattcaccactcgctcgacggtgccgaaatcgcccaagccgacttggaattccgtggtgctggcgatgtgttgggcgacgcccaatccggcggaaagtccagcctgaagctcctgcgcgtggtcaaggacgccgacatgatcgccgacgcccgcacccgtgccgagcagcttctggccgccgaccccgaactggcaggtgaggtccaactcgccggtgccgtcctcgacttcacccgaggcaacgaaaccttcctgacctccagctgaggcacctccagctgaggctagggctgcgcccccgtaatcgcacgatatagtttttccgtatgccgatcgtgaggaaatcacggtcgggaagccctcgaatgtgcttcagtggaggcaagaccattcgtacatgaggtgctcgaagtgcatatatcattggtgcgcttcgagcaccccattgttgttcatgattggtatgcgcagatgaacctgtacagtgaaagctatgcgtgtaatttctggacgattcaagggtgtggcgcttgctacgccgaaaacgggtacccggcctaccacggatcgcaccaaagaggcgattttctcgcacctcgactcatggggagtgctggatgatgcccgtgtactggacctgttcgccggtactggtgcgttgggcatcgaagcgctgagccgtggcgcgcgagaactcgtggccgtggaaagttcccggcctgcggcggcgctgattaccaagaccttggcgcagctacagaagaatcgttcgtgggatgcttcgctcaaggcccgtgtgctggtcaaaaaagccgagcaagtggctggcggcttcggcgaaccattcgacgtgatattcatcgacccgccctatgcctatgagaccgctgaatgcaatcagctactgtccgatctggcggcgggcagcgccaccaacgagaacacggtgatcatgctcgaacgctcggtacgctcggatgatcccactgcccccggaggctggcaaatcaccgaaagccgcaactacggcgaaaccgccgtcttctacatcgaatccgcggatgacgactcggatatagagcgttccgacgattccgccgcgtagtgaatctcccaccgtgtggtgaattaatcggcgagccggcgcggatgggcggcggagacctcccagcccaaggccatcagggtcttgcgatcggccttatccagcgccttgcaatccagtgccgcgataaggtctggccgaatctcggcggtgcgggccagcgcttcgtcgcggcgaaaacggtccaccttgccgtggtcgccggacaacagcacgtccggcaccgcaataccgcgccacacggccggcttggtgtactggcgatgttcaagcagtgcgccctcgccggtgtaggattcctcaacaatcgaatctgggttgcccatgaatccgggcatcaggcgggtgatggcctcaagcatcaccgacaccgctacttcgccgccgttcagcacatagtcgccgatcgaatattcgcgtacgtcgacgccttgggcgcggtagtagtccgggatgcgcgcatcgtagccctcataccggccgcagccgaacagcagatggtcggcatggctgagctcggtggcgtcgcgctgggtgaacaacggggccgatgggttcgggaagatgagcaccggtgcgccggatggggcggaggagtcgggtgctgcagagtcgccggggtcgcttgtatcgacggcgtcggttgcggcggacggctgcgagaatcccagcagttcgtccaggcattcgctccacacttcgggcttcatcaccatgccggccccgccgccgactggcgtatcatccaccgaatgatgcacatcgtgggtccagtcgcgcaggttgtgcgccttgatctccaacaatcccttggcctgggctttgcccatcaggctgaggttcatcacctcaaagtattcggggaacacgctcacgatatcgatcttcatgtcatccagcctaacggtagcccctcccgcattacacggccaccactacactattgcggtgatgaatacgacgatgaacctccccacccgcaaaaagcccgaagtgttgtccccggccggcaacctgaggggcctgaaaaccgcggtcgattatggtgccgacgccgtctactgcggcggcaaagccttcggcatgcgatcggcccccaaaaaccttagccttgaggatttcgaggaaggatcgcgctacgcccatgaacgcggcgctcgcgtgtacgtgacctgcaacgtgctgccgcgcaacaacgagatcgaagccatgcgcgagtacgtcggccagctcaaagacaccggcgtggacgcgctgatcgtctccgatattggcgtgatgatgatggcccgtcaggtggctccgaatctggaactgcacgtctccacccaggccggcgtgactaattatcaggctgcgaacgccttctacgagcttggtgctcgccgtgtggtgttggcccgcgagatggacttgcaggccgtgcgtgatattcgcgccaacattcccgatgacctcgacatcgaatgcttcgtccacggtgctatgtgcatggccttctccggccgctgcctgttctccaactatctgaccggccgcgatggcaatcacggcgaatgcgcccagccatgccgctggaagtattcgatcgtggaagagaagcgccccggccagtacttcccgatcgagcagaccgagaacggcgcctatctgttcaattcgcaggacatgaatatgctggggcacttggatgatttgattgactccggtgccaccagcctcaaaatcgaaggccgcgcgaaaagcgcctactatatcgccgccatgaccaacgcctacaaaaccgcggttaatgaatacatgattcaacgcggttttgaagacgctgatggcaatgttttgaagcctttccatgaccgtgtgattcgcccgggcgaccccgattttggccaaggaaccgaagatcaagtgatgcgcaatgctgatgccgcgttcgccggtgtggccgatgagggatatgaccgtggctctgatactgcggttgccgattcggtcaccggctcggttgccgcagaacgtgaccgcgtgacggttgctgatgccgtcgactcaactgcctctggtacgccggccggcaccgccgtcgaacccgacggcatgagctctcacgcccgttccacgcgccgcaagtccaacaccgcggtcgaacagattgagaccgattggaaacatgcggccgttcgcccggccccacacgtcgaactgcccgaatggctgctcgaggaaaccgacaaggtggcccaccgcgactactccaccggcttctattacccggagcacaaggtcacacagaacaccgaccgctccgcctacttccgctcatggctggtagtgggcgaagtgctgagctggagcgcggacgaagacggacgtgtcacgctgatgagccgtaacaagattgagcccggtcaacaggtcgaattcctgctgcctggcgagagaccattggtctttaccgtgccggaaaccggcctgcgcgatgccgatggcgcgccagtacccgccatcaataatccggcgcacgtgttctcgatgccctgcccgcaccaggtgcccatcaacgccgccatccgctcgcgcaccaaaaagcccaccctcaaagccgaataacctaccactccgcccccgctgactggggggtggtcatgaaaatcatgaacaccgcccgcacccaagaaagaatgccttatgcctgaatacagcgaagaaatcctcgattccaacagcatcagctctaccgataaagccggtcgccctattccggtgaccatccccatcgcactggcccccggcatcaaggtggtgtacaccacgcgactgggcggcctgagcaccggcgattacggcaacctgaacctcggcggcaagtccggcgacgaacctgaggccgtgctgtcgaaccgcatcgcactcgccgaagcggtgcaagcccgcctatcgctggtctcccaagtacattccggcgtggctgtggacgtggacgactcgttcgtcatcaacacccccttcggcttcgacgtgtccggcacacatggtgagactgacactccgcacgtcatcgaggcggacggccaggtcaccgcacaatccggcatcgccctaggcatgttcgcggccgactgtctgccggtgctgctgggcgacccggtcaccggtatcatcggtgcggcccactgcggccgtcgtggtctggagcgtggtgtgatcggcgccacggtagacctgatgaagagcaagggtgccgacccggcgaacatcgtcgccacactcggcccgcgcatctgcggcgactgctatgaagtgggcgacgagatcgccgaccagttcatcaagcgcttcccgctgaccaagacgaagacccgtttcggcggtgccggcatcgacatcgccgaagccgcgatgatcgacctcgccttcgccggtgtacatcaggtggtcgattcgatgccgcgcgtgcacgccgccacccagtaccttgaggaagacccggaactcgccgaactgtgccgtacggacggcgaaggcccggccgagctcgcggagcgcatcgacaacatcagccacagcatgtgcacgctcgaaaacccactgtggtactcgcaccgccgcgccgcgctcgccaacaaaacacacgaaggccgcctcctcgccctcatcgtgcgtgactaaacggagaatgcgagcacattccgtggagaagatgtgatgcagttcacggacggccagccctcaccttacggtggtgcctatgactgagagagatttcgatacccccgtcgagacgcctaccgtccaaccggcccccgctcagggtgccaaaccggcgcaaaccgtaccggtggtggccgtggtgctggccgccggcttcggtacgcgcttcgaccccgataatcccaagcagcttgtctccgtgggcggcaagcccatcgtgtgctggagcattgatgcctttgaacattgcgatcgcgtcagcgacatcgtggtggtggtcaatcccaaggtgcgcggtgaagtggaaacgttggttggcgagatgggctacaccaaagtccgcgtcatcattgacggtggtgacgaacgtgtggacagtaccgccgccgcgctcgacatgctggctacggctggcattccggacgatgccaagattctgatccatgacgccgtccgtccgttcgtggaacagtccgccatcgacggttcgattgatgcgctcgaccagttcacggccgcgaccgtggcctacgcctcaaccgacaccgtgctgttgaccgaggatctgggcgatttgaaagtggtcaagtcggtgccggaccgcccgaacaccttccgcgcgcagaccccgcaatccttccgcttcgcgacgattcgtcacgcttacgatttggctgccgccgacccggacttccatcccaccgacgacacgcgcgtagtggtcgattatctgcctgatgaacccgtcgccattgtctccggtgcggaaaccaacctgaagatcaccacgctggaggatattcccacagctgagcgtatcgccgaggagattctcggtcgtgatcccaaggaagaggcccgcgcccgcatgcacgccctgctggcccaagcggccggccagatgcatcgctagactggcattatgcgtgaactcaatgttgtgatctccggcttcgaccactatgacggcgtggaggtcaatcccgccgtcgaagtgcccaaggccatcgccgagcagggactgggcgtctcctctgctccggacgatccgttggagcaggtcgccgtcaccgttcatgccgtcagcatcccggtgagcttcgccaaagcctggcccacgctgaaagagacgattgaggccaccaagcccaatatcgtcatcgccaccgggctcaagcacgcagcccgaggcgtgatgcttgaacgatgcgccaccaacctgatggacgcgatcaagccagacgcggacaacgtgatcccacgccgcgaacccatcgaccccaatggcccggccgcctattggacccgcctgccgttgcgctcgatcctgaatgatttcacggacgattcgattccggccaccttgagttcggacgcaggtacgttcgtatgtaattcgctgttctacaacttgctcaactggaccgccacccaggagcgggtgctgggcggattcgtcagcttccctccggtcgttccggcgcattccagccagcatggtctaccactcgaccagcagatcgccgctggccgtgatgtggtgcgtgaagccgtgcgctactatctcaagccctccagttccgacatcctcatcgcctagcacgctgtgcgccacgccggaatagaacatggttcgcacgcattgtaacgattgcgcgtcgctcaacgctcagcgccagtgcgatgcgctacagtgctgcaaggatgtgccaagagctttatgcgtgtgcgaaaggaataaacagcgatggtggatcgtttcccggtggtgctgcgaggatatgacaaggagaaggttgatgctgccttcgacgctactcaggagagtatgaagcgtgcgcagcagacgttggccagcatgcgtgagcagattgcggcggatgacgaccgtattctgcaactgcaggcccaacttcaggaagagaagaacaagaagccggaaggcaacagcttcgcttccttgggagcgaacgcccagcagatgcttgcctccgccgaacagacgagtaccgaactgctggaacgcgccaagcaggacgcgtcctccatccgtaccacggctcaggctcaggccgaaacactgatcaacaacgccaagctggatgcccagcatattgttgacgacgccaatgccaaggccgcctcgattctgacgaacgccaacaatcaggccgaatcagtgaccacctccgccaacgaggatgccgcacaactgcgctccgaaactgccaagaccatcaccgaacagcgtcagaccgtcgagcttgagctcagcaacgcgcgcgaagagcacactaagaagatggcttccgaacgctccactcaagagcgcgaaatcgccgacatgaaggcggaggcgacccagcaggttgccgcaatgcgcaaaagcgccaatgaggagatcaccaagcttaagtctgattccaacgatcagattgaggcggcgctcgccgaggccaacaagaagctcgccgacgtgcgcgagcaagtgtccaagatgatgaccgaagcccagcgcaaggccagcgaaatcattgatgcggccaaaaccaagggtcaggaaatcactgatgaggccgaggtcaagcgcaccagcacgatgagccaggtcaacgccgaggtcgagcagatccgtcacgacatcgccgctcagcaggatgaggccacgaagaaggtcaacgaactgctgcagcacctcgaagagcgtcgtgtggcggccaagcgggaagccgatgagttggtcggtcaggccaagaacactcgcgaccaagccgattcgtatgccgcgtccaagcgcgaggaggcggacatccaggccgccgcaatcgtacataaggcgggcgaggaagccgatgcgcagatcgaggagcgtcgcgccgccgcccaaagcgagcttgacggtctgtccaagcgcatcgccgatctgcaggaacgcgagtccgtcatcacccagcgtgtttcggaactgcgttctatgttctcgcaggcgttctccggattcgctttcggcggtaatgcggcggcctctggtcaggatcaggaagccgctgccgcggcggcattgccggtggttgcgcccgtcccggaagtcaagcctgtacacaacgaggccgatgaccagccgggtgagttgagcggaaacgagtcggctgccgacgatcacaatgagacagatgcggcaccggctgattcggctgattcggctgcgcagaatgagcagtccgaatcgtctgagccgtccgagcaccagacacagggcgaaccggaggccccgactcaggagaatccggccgtatctgagcagaacggcgaatgacaggccttcgattagactattagcggtaagaattacggcacctgcgctttcgagccaggtgccgtattcgtttgaatctgcgccacaagcgcaccatcacagaaggagtatgacatgagtgaattgacgcctctgaccgacgaagcgttgaataccctgcgcggcgatttcgcacagagcggcaccaaccgtctggccatgaacgcggtgaccgccgccggcatcgacaaggtggctcgcaattatgaccgcgctcgtctgatgcagcgtcgtttctccaccatcgttgacaatggcgaagccacccatcaggatcgctccggccgctgctggctgttcagctccctgaacgtggcccgtttcgtggccaagaagaacatgaacttgaaggagttcgagttctcccagaactatgcgatgtactacgacaagctggagcgcgtcaactacttccttaaggatgtggccgctctggtggctgccggagagccttccgactcccgcctgatgcagcacctgctcgccgacgtgatgggcgatggcggccagtggaccatggccatgaacgtgtacaagaagtacggcgctgtgcccaaggacctgttcccggagaccgaatcctccaagaacaccggtgaaatgaacatccagctgcgccacatgctgcacaccgccgtggcgcacatgtacgccgctgacggcgatgcctccaaggtcgaggcgattattgccgacgccactgctgccggccaccgtattctgaccatccacctgggcgagccgccggtttccttcgactgggaatggaccgacaaggatggcgaattccaccgcgacggcgagattacgccggttgagttctggaagaagtacgtgggtccggctgatcttgaggactacgtgtgcctggtggacgatccgcgcaccgagcacgccaagggcaagaagatcggcatcgagcacctcggcaatgtggctggcggcgacgccaccgagtacctcaacgtgccaaaccagttcatgaaggactgcgtcaagcagattctcgttgagcagggcattccggtatggttcggtgccgactgccacccgttcatggaccgtgagaacggcgcttgggccaccgacctgttcgagtacggccgcgtgtacgacgtggacttcgatttggacaaggaagcccgcgtgcgcttcggcgactccgccatgaaccacgccatggctttcgccggcgttgacgtggccgacgacggcaccacccgccgctggcgcgtggagaactcttggggcgccaagatcgccgacaagggctacttcaccatgtccgacgactggttcaccgaatacgtctacgaggtagccgtcccgaaggccctgttgcccgaggaataccagaaggccctcgaagagccagccaccatgctccccgcatgggatccgatgggcgctttggcctgacttcgtcagcctcccggaatcggcctgacggccaatgctgtgttttctcgcagcctgtcggctgctagggtctctccctctgtcagcgcgaagccgctgacagagggagagaccgcggtcgcaggccgcacaacaacacagcatcgccgcaggcgagtccacacaggcgagtccacccaaagtccataactgccggcccaacaagcagtccccgtaacaaactgctatagttgggcttttgcgtctatggcgacataccgacagtacgtatacaaggaaaggagtcgagcaatggcagcactacgtggtccggatagttccgaggatgaacgtcgtttgggggagcaggccgtctttcctgagaccgtcgatgtcaacattcgtcagcttgaccccattcccgcgccgcgtgctttcctcagggagcagccgctcaccgatgagatgagcgagctcgtgctccactcgcggcaggaaatccgcgatgtgctcaacggccgcgacgaccgactgctcgtcatcgtgggcccctgctcaatccacgacccgaaggccgcgcacgagtacgcagaaaagctggctgccgtcaagcgcgagttggaagaccgactcgtgatcgtgatgcgcgtgtacttcgagaagccgcgcaccaccatcggctggaaaggcctcatcaacgaccccgatctggacggtcgcttcaatattcgtaagggcatgtggctggcccgcaaggtgctcaccgacgtgctgagcctcggcctgcccgccgccaccgaatggcttgaccccatcaccccgcagtacatctgcgacgcgatcagctggggcgccatcggcgcgcgtaacaccgaatcccaggtccaccgcgaactggccagtggcctgtccatgccggtgggcttcaagaactccaccgacggttccatcaaggccgccgccgattcctgcttcgcggccggcttcgagcatcacttcctgtccattaacttggacggtcgcgtgatttccgccgaaaccaaaggcaacccggattgccatctggttctgcgcggctccagccacggcccgaactacgatgccgaatccgtgcgtcaagctctggaagacctcaaggtttccaaagcgtccggcccgagccagcatggcctcgtcatcgatgccgcccacggcaactgcggcaaagacgaaaaccgcgaagccgaagtcatcgaagagatcgctgagcgcctggcgcacggcgaacaaggcatcaccggcgtaatgatggaaagcttcttggtcggcggtcaccaaaagccggccccgctcgaccagttggtctacggtcagtccgtcaccgactcttgcgtgccgtgggaacgcaccaacgaactgctgcacaccctagccgacgccgtcaccgctcgccgctcggctaaatagctttgtctttgtaaaaatgctcactgagacccactcagtgagcattttttgccaataacggtggtcatgtcagtttgttcccgtgacaccttatccttgggaaggatactgacccaaggagagatgttatgcagcagcaggaggaagcagcacattcgctgcatccgttgcaagtcggtccgcagccgttgaacaccccagaagagcttcgcgccattcgtcaggcgatgggggaggggaagaacccgctcgttgccactgatgtgccgcgttgggaagatcaggtgggtgtcagtcgcatcatcaaccgccgcgtattggagttggagccgctgcccacgcccgcgcaagtgctcgctgaactcccgctgactgatcaggctcaggaaatcgtcgcctactcgcgtgatgagattcgcgcgtgcctgtacggccaagacgacaggctgttggtcatcgtcggcccctgttcggttcatgacccgaaggccgcgctggactacgcgcgccgattggccaagctgaaagatgagctcggtgaacagctgctcatcgtcatgcgcgtgtacttcgagaagccgcgcactaccattggctggaagggcctgatcaacgacccggatattgatggcagccacaatattcgcaagggcctgttgcttgctcgcaaaaccttgcttggtgtgctgaaggaaggattggcggccgccacggaatttctggagcccaccagcccgcagttcatctcggacgcggtgagttggggcgccattggtgcgcgcaacacggaaagccagatccaccgccaattggccagcgggctttccatgccggtcggctttaagaatgccactgacggctcggtgaaggcagcggtcaacggttgcttcgccgctgctcagcagcacacgttcttcggcattgaccatctggggcgtgcctgcgcagtcgagacccttggcaacccggactgccatgtggtgttgcgcggctcgattcacggcccgaactacgatgccgaatccgtggccaaagccatggaagacgtacgcgccgaaatgcccgccgaatccgcagcctcgcatggtctgattgttgattgctcgcacggtaactccggcaaggacgaacatcgtcaggccgaagtcgtgcgcaatattgccagcagaattgcagctggcgaacagggtattaccggcatcatgatggaaagctttattgaaggaggcaatcagaaggccgcgccgcttgatcagctggtctatggcaagtcgattactgacaagtgcatcagctgggaagaaaccgaggccttgctgcgcgagcttgcggaagccgtagccacacggcgttggcactgagttgcgtcatcggctctctcgcgggagcaatgcaacgaaacgtctctacccctcagcctgccattcggcggccacctcccctgacaaggggagccgaaagtgttgtgaaaggaacttacgtatgggtatgaaaactgtagctattattggcgcattggatgaggaagtggcgctgatcgccaaatcgctcacgcatgtgacgcacaccgccaagggcagccttgacatcgtgtccggcacggtcgactccttcggttctgacgtcatcaaggttgccgcaacggtaggcggcatgggactggtcaatgcggccgccaccacgcagctgctgattgacgagattgccccggacgccgtgattttcagcggcatcgccggcaacctcaacacccacctgcacatcaacgacgtggtgctcggcggcaccctgcgctacctcgacactgacatgcggctcgtaggccagtggaagcccggcactgcggacgctccggtggaggaattccactctgatgaccgtctgctggaagtcgccgacgaggcgcttgccaatgcgggcattacccacatcaccggcatcatcgcctccggcaactacttcgtggacacgccccaaaaggtcgaggaggtcatccgactcaccggggctgacgccgtggagatggaaggcgccgccgtggcacaggtcgccgcccgcaataacgtgccggcactggtgattcgtgccctttccgacaacgccgacaccgattacgaggtattcaaggagttcgacatctccgaatacgccgataccgccgcccgtctggctgtcgacatcgtcaagcgcctgtaactggtcacctccaagttcggcgttgccggtgtgggctggtacatggccatcatgactgccctcgctctgctcgctctgttcctgatcaaggaaagcaaggacaaggactacgagctgtaaatagagctccccatattatgctcccgccagcgggagcattttgttatgtcgtcccgccaaaaatgaacaatagacgaacttacgtagtttaggcatctcactacgcctcgcacgttttactctggaaatcatggatatctggcagatcgtcgtgattgtggtgctcgccgcgctgatactggtgtgggttgccgtcatcgcctacaacaaaggccgcgtttcaggccggctcgccgccgaacaggacctgtccggcgacgaggatacgcattctctattcggtgatgatgcgcccgtgcgccccaccgagcgtcgcctgattgaagtcctgcccgaagccctgatcgtcaccgaccgcaacggtctggtccaatattcaagccccggctcagtgccattcggcctagtctccggcgaccgactcaactcgcgtgaagtcgaggacatcctcactcaggccgccgccgacggtggcatgcgtgagcgtgaggttcagctgccggtcaatcgcaattcctatccgtcctctaatggccgaggactggaggccggccagtcacgcccgtccaacacgctgtatttgcgtgtgcgcattggcgatatcggcgatgacctgtacgccatcttcatcaacgacatgtccgagcagcgccgtttcgaggccgtccgccgtgactttgtgaccaacgtttcgcacgaactcaagactccggccggtgccatcgcgctactggccgaaaccgtgaccgacgccgccgatgatccggacgccgtacggtatttttccggccgtatctccaaggaatccgcgcgcctgaccgaactggtgcatcatcttatcgacttgcagaaagcccaaagcccgcaaagcgtgatcgatgcgcggcgcatttccgcgctggatgtggcacgcgccgccatcgccgccaatcagacccaagccgactcccgccatgtggatatccgactgagtgtcaacggacagtcagtgcccacgaaggtcgaggagctggccgatggcgaaggttccttggaagaatcaggcagcccagccacgaacggtccgatgatcaaggccgacaaagaggccatgcaaaccgccgtcaagaacctcgtagagaacgccatccattactcgcccgaacacaccactgtggcggtcggtgtgggggagcgcgatggcaaagtcaccatccgcgtggtcgatcagggcatcggcatccccgccaaatcgctggaccgcattttcgagcggttctaccgggtcgacccggcccgttcgcgcgagaccggcggttcgggactcggcttggccatcaccaagcactgcgtgcaggagaacggcggtcggatttcggtctggtcgcgtacgggggaggggtcgacgttcaccatcgagctgccggccgccccggatgaggatgacgacgaggcccggtcggacgagtcgacacaagcgtagggccttggttggtgcccgatatggtgccattccattgccacacaatcacacagtaggcgaggtgcgcacaccgcgcgtagcccaattacgtactttcgggaaacagcaggctaacggagaacaaatggttacgataatgtcggaaaactttgcgcctatgcgcacgggaacatacccaagaaaggctactatgacacgcattcttatcgtcgaagacgaggaatcctatcgcgagccgctggtataccagctcacacgcgaggggtacgacgtgtccgccgcctccactggcgaggaaggtctggaactgttcaccaagggcggcatcgatttggtgctgcttgatttgatgctgccgggcattgacggcactgcactgtgccgtcgcattcgtgagcagagccgtgtgccgattattatgctcaccgccaagagcgccgaaatcgataaggtcgttggtcttgagattggtgcggacgattatgtgaccaagccgtactctttccgtgagctgctggcacgtattcgtgccgtgatgcgtcgcaatcaggccgctgcccaggcttccggcactgtggatgacgatattccgctggtgtgtggcgatatcgccatgcaggttggccagcatcaggtcaccgtacgcggcgaaaccgtgttcttcccgctcaaggaattcgaactgctcgaatacctcatgcagaacaagggccgtgtgatgacgcgtcaccagctgatcgaccgcatctggggttcggattatgtgggcgacactaagacgctcgacgtgcatgtcaagcgcgtgcgctccaagatcgaggaagatccggcgcaccccaagtatctgaccaccgtgcgcggtctcggatacaagatcgatactcccgcggagtaaatggaaggcggccttcgggtcgccttttttgttgtggattgtgggctcgctgtggactcgccgcaggcgagcccactcccaaaactacgtagcctcaacgtagcccacaaacatccaagtgttcatcttctgtttactgatttcggttttgggcccttgaaaccaccaatacgcttgtagttgtcatgaattgaccgggcagcgctgagccgcccgcgaatagttgatagagggattaagtaataatcatgcagaagaacatcctcgttcgctccattgccgctctgtccggcattgtgatgctcgcttccgtggccgcctgcggcgataacactgccgccacgaccgacaacagctcctcctccgattccacttccaagtccaccccgatctccggcaacttctcgggcgccggcgcctcctctcagcaggccgccgttgaagcttggatcgccggcttccagggcaccaaccctgaggccaagatcgcctacaacccgtccggttccggcgctggcgtgcagaccttcctgaccggtgccaccgcttgggccggctccgacaaggcccttgccgatgacgaagttgagcagtccaagtccgtgtgcactgaaggcaccgccttcgatgtcccggtctacatctccccgatcgccgtggtcttcaacctcaagggcgtttccgatgccggcaagcacatcaacatggacgctgccaccatcgccaagatcttcgacggcaagatcaccaagtggaacgatccggccatcgccgatcagaacaaggacctgaagctgcccgacaccgccatcaccgtggtgcaccgctccgataagtccggcaccacccagaacttcgtctcctacttcaaggacgtcacccctgacaactggacctacgacctctccgaaaactggccgaacgaggttggccagggtgccaagggcacttccggcgtgatctccaccgtcaagcaggccgacggcaccatcggctacgctgacttctcccaggtcggcgacctgggcaccgtggccgtcaaggtcggcgacaagtacaacgagatttccgccgaggccggctccaaggtcattgcggattccaagcaggacgacaccgttaagggtgacaaccgcatcgtcatcaagatcaaccacgccaccgaggccgagggtgcttacccgatcgtcctggtctcctacgacatcgtctgcccggcctacaaggacaccaagcaggctgagttcgccaaggcttggctgacctacgtgacctccgacgagggccagaaggccgctcaggatgccgccggcaccgctccgctgccctcctccctgaagtccgagatcaccaagtccatcgaggccatcaagaccaagtgatgacgtcggcccgcaagggtcgtgtggactggacctgacaactgaacgatagactgtagtagtaagagcagtcgccgccaactttaagccgcagtcgtaagccatacggctgcggcttaaagcgggtcaggacccgaacggtttggcaacgtcacagacgaaaaccgcaccacttgaatacttgataaccaccctatataaggagaatccgtgagttcgcaagacaaaacggctgtgcagccagttggtggcaagaccgccgacaaggtgtttcgcggtgtggcatacgcctgcggcatcctgatcctggttgtacttgccgctgtgttcctgttcctgttcttccgcgcctggccactcatcggtggcgatcaagccgccaacagccagaccgtgtccagctttaccggcggcaaggccagcagcttctggggctacgtgctcccgctgttgttcggtactgtgctcgtgtctttgctggcactgctgattgccttcttcgtgtccatcggcattgcgctgttcatttcgcattatgcgcctaagaagctcgccaccgcgctgagctatgtggtcgatttgctggctgccatcccgtccgttatctacggtttgtggggcggcctgattctggtgccggccatctacccgttctggaactgggttgccaaccacctgggcttcattccactgttcgagggcccggccgccaacccgccgcgcaccgtcgccaccgtggctgtggtgctcgccgttatgattttgccgattatcacctccatgtcccgcgatatcttcatgcagaccccgcgcctgcacgaagaggccgcgctggcgctcggcgccaccaagtgggagatgattcgtctggccgtgctgcccttcggcaagtccggtatcgtgtccgcctccatgctggctctcggccgcgcgcttggtgagacgatggccgtgttgatgatcctgtccccgggcctcaactactccatcaagctgctgcaggcctcgcagaaccagaccatcgccgcgaatattgccgcacagtaccctgaagccaacgatctgggcgtctccacgctgatcggaactggtctgattctgttcctgatcacgttcgtggtcaacttcatcgcccgtaagcttaccgagaaagcgactgcgtgatgactgctgctgagaacactgaaaagactccgatggacggcacgcccgaaatcgacttcgatcgtttccgcccgacccgttccgccatccagcgccgtaatatcatggaccgcttcatgtgggccctgatcgcggtggcgtttgtgatcgcctgcatcccgctgatctccctgctgtggaccactatcgtcaacggcatcaagcgcctgaacctgaacttcctgagctacaacatgaccggtgtggtcggtggtagccagaccccgtccggtggttacggcggtgtgctgcacgccatcatcggtactctcgaaatcaccgctggcgctatggttatctccattccgatcggtttgatgtgcgccgtgtacctggtcgaatactcgaaccgcggcaagctcgccaccacgatctccctgctcgtcgacgtgatgagcggcatcccgtccatcgtggccggcctgttcgccttctcgatgttcacgattctgctgggccccggtaccatcaacggtttcgaaggctccgtggctctctccctgctgatgctgcccaccgtggtcaagtccagcgaggaaatgctgaagatcgtgccgaacgatttgcgtgaggcttccttggctctgggcgttaccaagcagcgcacgattaccaagatcgtgctgcgcaccgctctgccgggcatcgtctccggtgccattctggccatcgcccgcgtgattggtgagaccgcaccgttgctgatgaccgccggctacatctccagcaccaacgtgaacctgttctccggccagatgaccaccctgccggtgttcgtctaccaggagtactcgaagctcagcgcgaactgcccgcccaacgccgacgccacctgcgtgaccacgattccgatggaacgtgcgtgggctgcggctctcgtgctgatcgtcatcgtgctgctgctgaacctcattggccgaatcgtggcgaaggtcttcgccgtcaagaccgagcgctaagccagtcgctaagcctaagccttaagaacacaaggaaatataaggaaacatcatgggacaacgtattgacgtcaaccacgagaacatctattacggcgactttctggccgtggaagatgtgaacatcaacatcgagccgaacaaggtcaccgccttcatcggcccgtccggctgcggcaagtccaccgtgctgcgcaccttggaccgtatgcacgagatcatccccggcgctcacgtcgagggcgaggtgctgctcgaaggcaagaacctgtacgacaaggacgtggatccggtggccgtgcgccgcgacgtcggcatggtcttccagcgcccgaacccgttcccgaccatgtccatccgtgagaacgtgctggccggtgtgcgcctgaacaaccaccacctggccaagtccgacgccgacgatctggtcgagtgggctctgcgcggtgccaacctctgggaagaggtcaaggaccgtcttgacaaccctggcatcggcctgtccggtggccagcagcagcgtctgtgcatcgcccgcgccgtggccgtccacccgcaggtgctgctcatggatgagccctgctccgctttggacccgatttcgaccctggctatcgaggatctgatcgacgagctcaagagcgactacaccatcgtgatcgtgacccacaacatgcagcaggccgcccgtatcgccgactacaccgccttcttcaacctgaaggccgtgggccagcccggtcacctcgagtacttcgcggacaccatgacgatgttcaacaacccgcaaaacgaagaagccgagcgctacatctctggaaggttcggctgatcgtttcctgcgcgcagcgtaatgatttgtgcgtaggagaaacggcaaagcccgccgcaaggcgggctttcgcatattcagagcgagtattgccgagtattaccgttctcgtaacggagcgagctggaatacttcgtcagactgggcggcgatttcccgcttcggtcgatcgacgggagaacggcggtaaagcggtacaagacaagtccgcacgatgaacactctgtgataaattttctgtttacgtgcgagtgtggaagaatggtcgcagcaaggtccagcaaaggagcataggtgagtactggtctgatcgtcagcatcgtcgttgtcgttattatcgttgtcttgattggttggggcgtcagcgcctataacaacctggtgacgctgaagaaccgtgtgaagaacggttgggcgcaaatcgacgtgcagttgaagcagcgcgccgacctcatcccgaacctggtgaataccgtcaaggggtacgcatcccacgagtctgaagtcttcactcaggtgaccgccgcccgcgccggcgtagtggctgcggccagcaacccgagcacgaccactgctcagcgcgccgccgctgaaaaccagctgtcccgcgccctgttcaacctgcaagccacggctgaggcatatccgcagctgcaagccaaccagaacttcatggatctgcagaaccagctcaaggaactggagaacaagatcgcctacgcccgtcagttctacaacgacgtggtcctgaagctcaacaccgccatcgaaaccgtgccgacgaacatcatcgccggtttgttccactttgaacaggcgcaatacttcgaggccgatgatgcctcccgtcaggtgccacaggtccagttctgacccgctccaggcccgtccggtaagccgccggccgggcccgtattgtcttaagagagggaagatatgtggatgcgattcattcgcgccggaatcgtcagcattgttgccacggtggtgttggcagttatcaccttggcgataatcgggacttccgcgttcggcgattcggccgacctcagctaccgcacgctggactatgacgtgaccgccaccgcgaacggtgatttgaaggtcacgcagcatatcgacgtcaagatgcgtgagcgtaccgacagcgacgacaacaccaagccgtggaagcaactgtttcagcaatacacgctgaactccggcaccctgactgatatcagcgatatcagcgtgcgcaacgtcacagacggcatcgactacgcacaacagagcgagcccaagctgcccagtgacgtcttttccgacaaggaatggaacagtgactacgccaaccattggtatatcgccgatgtgagcgatggcagcgaccatccaaaggcatacacgcccggtaccgatggcctcaagcccagcgcctccgccaccgaagatgacacaaccgtggagatcggctggaatattccggtcaccaccgaggccgacagcatgaagttcgatgtaagcttcaccatgcacgatgtggccaccaagtggaaggacgtggcctccttccaatgggagccgttcggcaagaagaaccaagtgcctatcggcacggtcaccggcaccgtccatttccccaacggcatcaccggcaaaacctcatggacatggctgcacaccgagcgcacctcggaaaccaagcgcaacagcgacggcagctatacgttcacggcctacaacatccacaatggcgactacctcgatgtggtcgcggcgttcgatgccgccaaagccaagggcatcgcccgcaagggaaccggcaatcatctcaaggacctgaaacaggacgaatataagcaacagcagcgctggctcgacaagcaacgattcgctgccagagctcgtctcgtgttctggattgtcagcatcgtgctcggcatcgcgttgtgcgcgtggggtatctgggctgtgatctccagcaaccggcgtgcgcaatacagtggcagcgtcgaatactggcgcgaccagcccggcatcagtccggcttccgcagcccgtctgattcgcgtggtcgatccgtcgacgcgccaatccgatgaagaccgccagctgaccgccaccatgctgtcgctcgccgtcaagaaggccatcgccatttatccggggccgtcggacatgtatcgcggcatcgacatgagccaggccacgccggtgggcttgagccaaatgattgccgccgaccaaggcaagcagtatgcggcaggcatcaccagcaccatcgtgattctgccgctcgccattgatgaggcacccaacgcgcaacagttgggattgagcgaatcggaagatgcgctgctgaacctgctcatcgtcatttctcagcgcgtgggcagcccggtattcgacctgaaccagatgaaggcgacctgccagaactggcaagacggctatattgagctcggcaaattcaccggtgcatgcagcatggaataccagcggctgggtgccacgcgctctgtgggctggcaatggatcctacccggcgtattggccgccgtgctgggatttggttcgctgctggccaacagctttatcggatacccggtggctggtcttatcgggctgccgatattcctggtcggactgttctgctcgatggccggcgcgatgaccgtgctcactgatcaagggcaggatatcgccggccggactctgggccttaagcgttatatggaagacttctccaacttcaccgaccggggtaccgccgatttggccttgtgggattggtatatggtctacgccgccgcgtttggcatttccgatcgcgtgatgcgtgaactggccaaagcatatcctcaggtcaacgacccggcttggctggatgccaacgcctccaactcgttgttctactggaactaccgcccgtatggctggtacagccaccgtcataatggtccattcgaccacgatgctgccgggcagatggacctaggcgttggcggcccagctccggcttacggaggcacgtcgtttgccggcggattctccgacctcggctcgcagctgaactccggtctggcggacatcagctcgaccatcagcgcggcagcaccatccgccgattccggtggcgatttctccagcttcggttcgggcggcggctccggtttcggtggctcgttcggtggctcgggtggcggctcgttcggcgggcggtaaatccagcgttctgcttacgctggaatcggacacagaccgtctcattactgttgaagggaatcaccatggcattgttccgtaacctcggaccgttctccaccaccgccatcggccacggcgaaatgccgctgaccatcgaaaacaatcgtggccacgaggtcggcctcgaaaccctgcatgcctcgctggacgccggctgccgtcacatcgacaccgcttgggcctactactgctccggcggcgaagaacagaccggtgaaaagctggtgcgcgaggcccttgagacctggaaggggccgaaggacgaggtgctggtggccaccaaggtgggccacttccgcaacttcaccgacggccgccccacgtgggatgtggacggtcgcccggagaacctgattcgtcgcggcaaggagagcgcactggcgctcggcgtggacaccattgacctgctgtacttccaccgccccgatccgaaggtgccgtacaacgagtccgtcgaagccatcaagcagctggtggacgagggcgtggcgcaggaggccggtatctccaacgcctccatcgagcaaatcaacattgcgcgcggcattctgggcgacaagctcgtggccgtgcaaaaccagtactcgccgattcacctggagacccaggacacgctcgactactgcgccaaggttggcttggccttcgtgtgctggagcccgctcggcggctaccgtcacccctatgatgagaccaagttcgacccgttccgcgaggtcgcggcggcccacggcgtgagctaccagcaggtcgtgctggcatgggagctcgccaagggcgaccacatgttcgtgattcccggcgcgcaccgtcccgaaaccatcctcgactccctgaaggccgaccagctcgaactcacccccgaagaactcgccaagctcggctgaactttctcagctccccttgtcaggggagctgtctcgcgtagcgagactgaggggtagtcgccggagtagtcccgggtagttccacaaggagataattgtgcgcaaaaaactcatcctcgacctcgataccggcatcgatgacgcgctcgccatcgcatatgccctaggcagtgccgacgagatcgatttgatcggtatcacggccacctacggcaatgtcgcggtgccgctggccgcgcgcaacgcgctggcggtactgcacttgttcggccgtgacgacgttccggtctatcccggagtcgaccatcccatcgccccggcaacattgccgaaaatgcgtggcaccacaccagacgagcgggcccaggcctacgcgcgctggcagaacggcggcgcggacggctggcaaacggacgcttcgtggtcaccaactcccggctcggtggcggtccaccatcccaacggcatcggcggcgcaatcatccccgactccccgcgcgctccggaagcaccaggctcggcggtcgatttcatcatcgccgccgcgcgcgaatacggcccggacctgaccatcgtacctacgggcgcgatgaccaccatggccaccgtattccgcaacgctccggacttgaaggattccggtgtgaacgtgacgttgatgggcggtgcgttgacgctgcccggcaatgtgagcccggctgccgaagcgaacatctcccaagacccagaggcagcagactatctgttcaagtgcggcgcaagcaccaccatgatcggcctcgacgtgacccaccagaccgcgctcacccgtgagaaagcccatgaatgggcgtctttggggacgccggccggcgacttcctcgtcaccatgaccgactactacatcgacttctacctgaagaaccagccggagattcacggatgtggactgcacgacccgctggccgtggccgccgcgctcgacccatcgctggtcacgaccttcgggttcaacttgcaagtcgatctcgagggcccgttccgaggccgtaccatcggcgatcgttcacggctccaggatcccgacaaacacacccaagtcgcattgggcgtcaacgtgccggaattcctcgaccgtttcatgacccgcgtcaccgcggccgcgtgcgggtgaacgattacgcttcggccctgctcttttcgatttgacgtttgagatattcgcccagcccatccacgcaccaaagtgggatgttcgtcagccaagattgcttcctatagcctatttctcctatacggataccgtggagcccgtatctgttgcagacatacgagagacttctcgcacgaatattggaagaggatttcacttcgatgggaaaaacctcgtctccctgttccattacgaaatctattttcgcatttccttgaggatttgggttagcccaatagcggggtttgattccttgagctaccagctgctgacatacgtattgttctacgaacgcgcccttgaattcggaaaagagcttcgacttgttcaccagagtattcacgtcgagaccggacagtgcgcccagtatgcccgtgtcttccagatagatcttgaacgtgttaagactctcatatccggtcagaggaatatgcagagcatcgaggcaggggactttggtaatgattccgtagtccgtcagccaagtgagcgcttcctcatattcgcgggcgcgggctccttgcctgacaacaccgtaaacgaatttgcgattctccttggcaagttgtgatggcagtgtgttccatacaagccggatacgctcgcccagcgtatatgcggcatgcttggaaaaatcaagatcgtaggcgttgagaatatcttgttggacagctcgcacatcctgcggaatcccgttatccaggtgagcgcttaatgctgctggcatgccgccgacccacatatatgttttgagtaggtcattcatctgaggttcgagagcttgtggaatgtcctcgaaccggccttcacgtatggtgtcggcgatcatgtcttgtccgatgctgtccagatattcgacgaaggagagcggatgtaggttcatcatggtgacttttcctacaggaaaagaggttttgccgtgcttggatattcccatgtaggagccggtggcgatgatgtcatagtcgggtgcctgctcggtgaagtatttgagagaggtcaacgcgagcggactttcctgtatctcgtcaaagaagagcagtgttctgccggggagtatccgttggttggcggcgagttcgagctgacggattattcgttgcgggtcaagatcctgctcgaatatcccggatagggatggccgctgcatgaaatcaaccgagacgatgctgtcgtattgtccattcgcgaactcgttgacaagccatgtcttgcctgtctgccgtgcgccacggatcaggagaggcttatggtcaggtgtggtcttccactgcttgagcgttttcagtgcttttcgctggagcttcatgacggatatcctatgataaatgtgcgacgcttacacatttatcatatcataaacgtgtaagcgttacacattttttatagtttattgcagtcgcagtagttttagcgcaacggatatcagctgatcggtacgggtcttgatcgcttcggcatcccatttggttatctgtgaggctcagccatattacgcggtataaacgttaaggagcaatcaaagggcggtctttctgagattagtctcagaaagaccgccctttgcaatggaataaattgagtgtggaactcggtattggtttgaaagactgtttacagcccgggaatcagaccgccgggcggatcgagcgtgaggtattgctcctccagatcgatgtcggggaccaaggcctccacgaacgggaccaacgcggtcttttcgaccacatcctcgcccttggaattctggccggttaccaccggctcggtcaaacgaatcttgagcagggattgggcgggggagtcgatcacatccaccactttgccgaccacttggccggcgggcagtcccagaccgttgccctcgactagacgggcctcaaggccaataagatccttgggataccactcgtcggcctcgagcatgtcctccgcatcgtcgacctcgccgtagagttcgacaccatttagggcctcggcggcattgcggtcgtcgacgccctcaagcttgagaatccaacgatccttgaacgtgcgcgagccctcgacgatgtactcggtctcgccatcctggctgtagagcacggagtccggctcgaagcgccactcgggatcatcggtgtacaggcgcacggtgacttcgcccttcaggccctgtgcgcggccaatacgagcgaccctcagcaactcgagctgctgagggtcgtcgtgcatgtcttgctgtgtcatgctgtgaatcgttccttatcggttatcgacggacgtccatgatgtcaacgcggaccttgtggtcagacagtgcctgaatcacggtgcgaatcgcgttggcggtgcggccgccacggccgatcacacggccgatgtcttccgggttcacgcgtacgcgaagcagttcgccacgcgcgttctcatgggacttgacggaaacatcgtcgggaaaatcaacgatgttcttgatgaggtgttccacagcctgtgcaagcatagctagcctttcgtttccgctcagtcctcagccggggcttcttcggcggcctcttcagccggggcttcctcagcggcggcagcggcttcggcttcagccttggccttggcagcagcttcggacttggcggccttcagcttctgagcctggtcctcaacggccgcgatgcgggcctcggcgtccgggccagcctcaacggtcttcagggtgccttcggcaccttcaaggcccttgtacttctgccagtcgccggtgatgttcagcagcttgaagacgggctcggacggctgagcgccgacgccgagccagtactgagcgcgatcagacttgatctggatggtcgagggctgggtgttggggttgtaggtaccgatctcctcgatgaccttgccgtcacgcttcttgcgggaatcgacgaccaccacacggtagaaggcgtagaacttcttgccctgtcgcttcagacgaatcttggttgccaaaatggctctccttgtaatgctaggtgtgcgggttctcggtttgccatgtggggcatggccgtccggaatccacgtgtcctcgcggctcggggtgtagagggcgccacgcgcgcgcgaataactggcctattatagcgcacagggccggactgggcgtggcgcactgtggttgcggtgtggtgcgcgttccccgttgcgcaacattccggggaatgtatcgcgaaaatgccggctatcgcagtgcaagcgttgcggtcagggccagatgatcagtgccctcgacctcaaacgacttcacgccggacggtttgagcccgggagtgaacagcacgtgatccagctcgatgcgcggccacttgagccagctcgggaaggtgagattcgggccggcggcttgaatcagacttgcgtccttgaatccggacttgagcaacgcgcggaagctcggatggtcggtgctcgagttgagatcgcccataacgacgacgatattgcgattgctgacggattttgcacgggcgagttctcgcagacccagaatgccggccgaccaatccgcgcagccgcgcatcggcgatttcgggtgagccgaacaaagcgtcaccgtgcgattaccggaggttttgagggtgatggcgggaacgtcggcggcggggatggagaccacgttgggcaccgctgcgctcggctcgtagcgggaatagatcacgttgaatccgccattatcggtctctttggcgtctccgaactgatggtaggggagaagttcgttgatgtcggcttcggtaagacgtgtgatgaggtcgtcggtgacttcctgcaaggccaatacgctgatattgcgttcgcgaatattgcgaatgatttcagcggcgtcggcgcgtccgtatcgacaattcatcgtcataaccgagaactggggcgagagtgtttcacgcgttgtttcacagtgtccatcggagatggtttcgggcccttccttcggagtgtttgaggtacccgatgtattgctgttatggctttttgacagcgtcggcgaagttgtttcacgggctgtttcacggtgggattctttgcgtttcccggccgggtcgattgacgtaccccagtagttgatgcgctgtgagctggcaatcagcgcgaccacaataagcaacgacatcgcagtccattcatgttgccatgcggcgaccgcggccagaatcatcaaaggaacccacaacagcggcgtcagggcaatcatgtacggaagcggcatacgggcctcgagaccggcgggcagcgcgcttaaggtcgtccataacagtgcgatgattgccaccgcgctgaggattgtcgtcatggaagttcctttcgaaatataaattgaaccgagatataatttggctcccctctgcgaggggagccaagttgtgagatcagcgaccgaacagtccgccaaggcctccgccgaggttcggcggcagttcagtgccaccgtcgacgttgcccatcatctgctcaaggccagcgggcagggccgggttctgtggcttcttggcgaaggcggaaccgccggtcgaaccggaggacttgccggccagcttatcgcgcaatgccttctcctcggcctcgcgcttcatcggattgccggacttgccgcccttcttcttgttcttgcccttcttcttgccgccgcccatagccgggccgccgaagccggggatgccgccgcccatgccgccacgattggacatgcgcttcatcatctttgcggcctgctcgaaacgctgcagcaaagcgttcacctgagaaaccgtcacgccggaaccataggcgatacgggcgcggcgggaaccattgataatcgacggatcgcggcgctcggccggggtcatcgagcgaataatcgcctcggtgcggtcgatttccctctcatcgaactgctcgagttccttgcggtgctgggccatgcccggaatcatgccgagcagcgacttcattgagcccagcttgcgcacctgctgcagctgatcgaggaagtcgtccaggccgaaggaaccttcggagattttctcggcggccttgcgggcctcttcctcatcgaactgcttctgcgcctgctcgatgagcgtcatgatgtcgcccatgtcgaggatacgcgaggccatgcggtccgggtggaagacctcgaagtccttcaggccctcaccgttggaggcgaacaggatcggcttgccggtcacggacgccacggacagcgcggcaccaccgcgggcgtcgccatcgagcttggagagcaccacgccggtgaagtccacgccctcgtcaaaggccttggcggtcttgacggcgtcctggccgatcatcgcgtcgatgacgaacaggatttcgttgggacgcacggcatcgcgaatgtcgcgagcctgcttcatcagctcctcgtccacgcccagacgaccggcggtatcgatgatcaccgtgtcgtagagcttctgcttggcgagttcgatggaatcgcgggccaccttcaccgggtcgccggaggtctggcccggagctgcgacggcctcgccgccatcggattggacgcccttttcgggagcatagacgggcacgccggcgcgttcgccgaccacctgcagctgcgtcaccgcgttcggacgctgcaaatcggccgccaccagcagcggcgtgtggccggaatccttgagccagtagccgagcttgccggccagcgtggttttaccggcaccctgaaggccggcgagcatgatgatcgtcggcgggttcttcgcgaagttcagcggacggtcgacgccttggccgagcacgtcggtgagctcctcgttgacgattttcaccacctgctgggcggggttgagtgcgtcggacacctcggtgcccagtgcacgctcacgcaccttgccggtgaaggaacgcaccacgtcgagcgccacgtcggcgtcgagcagcgcgcggcggatttcacggatcgtgccgtcgatatccgcctcggaaagcttgcccttgctcttcagatgcttgaacgcattcgagagtctgtctgtcaaagatgaaaaagctgccataatgggcaacagtctagccgccacgcgggaaattgcggtgttggggacgacgcttttcggggaatgtgccgcgtagtagtcagggatgttgggcattcagacggcaaatgccgtgccgtccgctcgtggcgaagccaatcgagtgcttccgataccatggaaaccgtaaagaatcctgtgttttttggaatacttacgctgttttgaaaatcgctggacaccgcttatacgcagactgccgtgcgctccgaaccatgacgttcgggccaacgcagacatgccgtgcaataaggaaggcccactgatgcccacccaaaaactactcgaacgcaaagccctgatcgttggtatcgtcatcaacgtgctgcaggtcttagccggcatggccgtgttcttcatgaccggtctcaaggccatgttcctcgacttctccttcaccgcgatttccgtcctgtccggaatggtggcggtgtacctctcgtcgcgcacggtgcgaaccaccgagcgcttccccaatggcatgttcgcactggaacctatctacgcgatctgcaaggccattttcaccatgtcgttgttggtgtattcgctgattgacgtgtgccgagtagcgtacgactacttcgtgttcgggtccggcgaacgcattgaaaccggcccggtggtcatctacgagatcctgaccgtaatcgtgtgcttcagcctatacacgtattaccggcgctccaaccgatccatcggcgattccagcaccatgctcaccgccgagtgcaagagcacgttggtcgacggatcgatgtcgttcggcatcggcgtagttgccatcttcctgatgctgctaccggccggcggtccgcttgacttcctgcactacaccggcgatttcttcatcaccgtggctttggtggcattgaccatcaaggagccgttcagcgtgctcaaagaggcgttcgtggaattggtcggcggcgtgcatgacgacgatgaaaccaacgcctacgtggaggccgaggcacagcgccatctgcctgccaacaccgactacgagcagacgctgatcttcaagaccggtatgaactacaccgttgacgtgtatctgagcggcatcggcgaaaccattgatgtagctgacctcatcgaatgcaagcgctcgctggaaaaggagctcagcaagcgcctgcacatcgtggacgtggacttcgtgtttgactgattgatgggtttgaagcgactacttcagactccaagtggaaccctgcgggccgtcttcgatggcgatgccggcctcggtcagggcgtcgcgaatctgatcggccttggcgaaatccttggccttgcgagcttcggcacgggcgttgagctgttcggcgatcagtgcctccagcgctgcatgctcgggcgactcggccgtgccatcagcggcaccgccggcagcgccggcggacacccacggttcggccagcgggtccaggcccaaggtgtcgagcatggcacgcacggcgagcagcgcctcacgcacctcggccttggcggtttcggaatcggcgcggtcagccagctgtgaaagcaacgtattgccggaacggatggcggtgaagatcgcggcggttgcaccagacacattgacatcgtcattcatggcggccacgaaatcggcgggcaaatcgtcggcggagacggcagtgacttcctcgcgagaaggctgtccacccagcgccacaccggcacgctcgatgaagttcgagacgcggtcgtatgcggcctgcgcctcgaccagcgcctgatcggaccattcgagcatcgaccggtactgcacggagcccagggcgtaacgcaccacccaagcggaatgctcagccaacacgctcggcacggacaggccggtgcccagcgacttcgacatcttctcgcccttggcggtcacccatgccgaatgcatccagcgcgcagcggaggggtagccggccgcacgggtctgagccatttcgttttcgtggtgggggaagcgcagatccaagccgccgccgtgaatgtcgaagccatcgcccaggtaacggtgggacatggcggagcattcgatgtgccagccagggcggcccacgccaaacggcgtcgaccaacgggcgtcctcgggatcggtgtccttcggagccttccacagggcgaaatcacgcggatcatgcttgtcgggggaggcatcggccgggtcgaccggattgtacttgtcggcaccggtggcgtccacggacgggcccatgcggtcggccacggcggcggcctcatcgacttcggaggtctgcttctggtgagtgagttcgccgtaatgcggccaggatgccacatcgaagtacacgttgccggtgggcttgccgtccgcatccgtgaccacatagccgtgaccgttgtcgagaatgcgctgaatcaggtcgatcatgtccgacatgtggccggtggcgcgaggttccacagtgggcggcagtacgccgagcgtgttgtatgcctcggtgaattcgcgctcgtagtaataggcgcgggcccaccaacgctggcctgcggccgcggccttaacgagaatcttgtcgtcgatatcggtcacattacgcacaaaagtgactttgtagccgagcttcaaaaaccagcggcgcacgatgtcgaacgccacggcggcacggatatggccaatatgcggtgacgattgcacagtcgcgccacacacataaatgccgacttcgcccggcttgagcggcacgaaatggctgacctggtgcgaggcggtgtcatacagattcaggccttctgcggccttggcaacatgcaccggcgtcaggcttgaaggcatgacggaaatgttgaaatcctgcggttcttggctgtttcccataacactcaagcgtagggtccgaaccagacatgctgaatcgttactcgaagagtttgatgaacgcttcacaggtggggcccgaacgaggtgacagacggatgagaagcgggacaacagtctcgcgagaacacgtctttgaccgctgcggaaactgcgagattcatggatttgccctgctcgttacgcaaacggggaacgctcgtgccacaatagaagtcatggccacaccacaagtgctcattttgcaacatgtcccatgggaacgcccgggacgcatattgtcgaacctcgaggacatcggtcttgagacggtgacgatgaatatcgtcgacaaaaagaaaccggacttgcctgatttcggcgaactggctggcgtggtaatcatgggtgggcctatgggcgcgcttgattacgacaagtatccggggctgaaggcagaagccaagttggcgcgtgccgccgtggcttcaggcaagccgattctcggtgtatgcctggggcatcagattatcgccactgcgcttggtgcgcagctgcgcaagggcgatgcgccggagattgggttcgcgccgatcaagcgtgtggacaagcatgacttcttctccatgtgggataagcagctgacagtgctgcactggcataacgacgtggtgggcctgcccgcggaaggccagctgctgtcgcgttcgtcttccaccaaggtgcaggcattccgactgggatccgcgctgggcatgcagttccacctggaagtgtgcggctcgctgctggacgaatggctggatgagccgagcatggtcaaggatctcaaggccgcgggtggttccaagtcccaattgcgcgagcagttcgcccaatacgaccagctactgcaaccgctcgccgagcaagtgttctccggttttgcggcccgctgcaactcctacgctcagacgctgaacaaataacgtttgcgggccgccgctgggcaagcgtggcgctacattggtgagtcatgccgacttatgacattggactggaacacgtttcgctcgctttcgctaccaaaaccatcttcactgatgtaacgcagggtgtttttgaaggcgaccgcatcggcatcgtcggcaagaacggcgacggcaaatccacgttgctgcacctgttccgcggtgctcaggagccggattccggccgcgtgacaaagcgtggcggactcacgttcggcatgcttgaccagcgtgatccccttgatgacaacgccaccattcgcgaagccgcacttgaggggcgcgccgactacgaatgggcgtccgataacacttcccgtgaaatcgtcgaggcattgctcggcggcatgagcctggatgccaaggtcggctccttgtccggcggccagcgtcgccgcgccgatttggcccgactgctgctcaaggattgggatattcttgcacttgacgagcccaccaaccatctcgacgtggtcactatccactggcttgccgaacatttgaagaaccgctggtccaaaggccagggcgctctgttgctcgtgacccacgatcgctggttcttggacgaggtctgcgaatcgatgtgggaagtccacgatggcgtgatcgagccgttcgagggcggctattccgcatatatgctgcagcgcgtggaacgcgatcgccaagccgatgtgcgcgaaaccaagcgccgcaatctggctcgcaaggagctcgcatggctttcccgcggtgctcgtgcccgctccaccaagcagaagttccacgtcaaggccgcacgcgaattgattgccgatgtgccgccgatgcgtaacacacttgaactgaagcaaatggccacctcccgtctcggcaagcaggtggtcgatttggtcgacgtgacgcagattttcgaaaaaccgcagggcatggccgatatcgacccggatgtggcggcgctctccgcgtccgcttcccgcgtggatgtggtcaacgccatgtacgccgagccgcagctgcatggttccgttgaggtggcggtcaccgacatgactgacccgcgcctggtggacgccggcgtgccggaagccgtcgagtccgctgaggaagcgcgtaagaaggccgaggctgagagcggcaatccgcagcttgctgacgatcgcgaggttcgtcgcatgaacacgggtggtgaaaccatcggcggtggcactgctgcaacggattcggatgatgacactgctgcagccggtgtcacctcggctgcacgcaaggtgacggtttccggccgcgagattcttgacgatgtgacttggctgattggcccgggcgaccgcttcggcatcgtcggtgcgaatggtgccggcaagtccacgctgcttaagttgattgatggcacactcaccccgaccgcaggccatgtgaacattggcaagacggtgaagttcgcggtgctctcgcagcgcctcgatgagctggagaagctcggcaagtacaagatcaaggaagtgctttcccgctataagccgagctacattgtggatggcaaggaagtgacgccgggacagttgatggagcgtctcggcttcgaatccgcccagctgatgacgccgatccgcgatctctccggtggtcagaagcgccgcatgcaactgctgctgattctgcttgacgagccgaacgtgctcatcatggacgagcccggcaacgatctggacaccgatatgctcgccgtgatggaagacctgctcgatacttggccgggcacgttgattgtggtctcccacgaccggtacctgctggagcgcgtcaccgatcagcagttcgcgctgattggcggcaaagtacgtcacttgcccggcggcgtgcaggactacctcgatatggttgaggctattaagaacggcaagggattgccggctgacacgcctggcttcgcgggcaccggtagcagctcggcgaagtctggtaagggtaaggcggccgccgtcaacgctgccgcatctctccctcagtccgcttcgcggatagctccctcgtcagagggagccaataacggtgaggactccacctcgaagctcaccggcaaggccttccacgaggcatccaagcgcgtgaatgccatcgaacgtaagctcgctaagcttgaagagcagaaggccgatctcgaggcgcagatggccgcccatgacccgagcgactacgagggtctcaacaagctcaatgaacaactcaccgccgtcaatactgaaagcgatgatctcgaagccgaatggctcgaactctccgaacaattggagtagcgggagaaaccgtaacgttcacaaggcctcggcagtttgccggggcctcccgctatgcaaactcccacggattaatcaattccacgtcggtaccttcgaagtccttgatattgcgcgtggctatggccgcatcccaggaacaggcaattgccgcaatcatggcgtcttgaatactggtaggtgtgcccctgtgttcgcgttcgacaaggatatgggcataatccgcagctgcctgagtgtcaaatgcgaacgttctgtcctctaatgtcataagcgccagcttgacggtcgtatctgtgtactttcgtcgtttgccttcaggcatgcgacatattccggccaacaactcggcgacggtgatggcggtggttgccaaattgcttgtatcttggttcctcagccaattggcaacgtgttcgtctggctgtttcttgatgatttcgctgatgacgttggtgtccagaataatcatggccgattcctattcaaaagatactggcggtcgggaatcggcggaatttcgctcggatagtgggagttcccccttgtcgagtccctcaaaatccatgttcttcatgaattcgcggatctcgtcatagaaattggtctttcgcgtgatttcatgcgccaccgtgccagccagccattcttcaagaatggatcgcacctgagattccatggagcggttgtttttctcagccacttctttgagctgttgaatctgctcatcgggtatttttcggatggtcaatgttgccatgatgcacctccttgttgctgtcataatgctagcatgaggtgctgtcattttgcttgcagtacgggtgatgaggtatgcacgtatgaaaaaaggcggatatgcatcatgcacatccgccttttgagcttggactgggtcttcccgcagtcgccgaatcagcgcccggtaacctcggaaccgacgaccttttcgctcagggcgcgcgggccgcgggtcacggctacggcaccggagcgcaccagctcaatcacaccgtaatgctccaaaagccccagcagggcgtcgatcttgccttcggcaccggtggcctcaatggtcagcgattccggattcacgtccaccacgcgcacgcggaacaggcgcacgatctccagcacgtcggaacggttggattcgttggcggccaccttgatgagcaccagttcgcgttccacggtggagttcgggtcgagttccacgattttgagcacatgcagcagcttgttgagctgcttgatgatctgctccagcggcacggcctccacgtcggcggtcaccgtgacgcgagagatgtccggacgctcagtgggggagacggacagcgagttgatgttgaacgcacggcgggcgaacaggccggcgatacgcgccagcacgcctgggcggttctccaccagcacggacagcgtatgacgctgggaaccaggctgggatgcaggatagttagccatgagtgttctcctctcctcagtgctcgctcgcagtggcagcggcggtctcgtgctcgaacacgccggtcgcatgctcgtccggaccggttcccggagccggggtgccgccagccagcggcttgatgccgggcttgtacgtcacctcgtcgttgggggcgccggcggctaccatcggccacaccatcgcatccttccacacgcggaagtcgatcagcaccgggcggtcgttgatctggttcgccttttcgatggcggcaatcgcctcttcctcggtgaacgcgcggatacccacgcagccgtatgcctcggccaacttgatgaaatcaggcacttcgagcggcgcatcgccgtcggccagtgccgccgcaccatcggcaccgtgcgcttcaccatcgagcaggttggtctgcgagtagtggtgctcgtagaacagcgtctgccactgacggaccatgccgtatacggagttgttcagaatcgcgatcttcaccggagcgtggtccaggaacgcggcggccagctcctcagaggtcatctggaaggaaccgtcaccatcgatcagccacaccggcttcttgccctcgaactcgcgggccgagcccacggatgcgccgatggcggctggcagaccgtagcccatcgtgccgaggcctccggaggagatccaagcgtgctggttctcaaaatcgatgaactgcgaggcccacatctggtgctggcccacaccggtcacccagatggtggacggatcggccatctcagagagcttcttgatgacccactgcggggccagcgatccgtcggtcggctcatcccacgtcatcgggtattcctcgcgccagccgtcaatcgccttccaccagggggccagattcggcttgccctgaatggcctgcgtacgctgaatctcgggaatcaagtcgtcgagcacggtagccacatcgcccacgatcggcacgtcgggctgacggttcttgccgatttcagccgggtcgatgtcaatgtgaatcacgcgggcggtcggtgcgaaggcgtcgagcttgccggtcacgcggtcgtcgaaacgtgcaccgatggccacaagcaggtcagcgcgctgcacggcgccggttgcggcaatcgtgccgtgcatgcctagcatgccgaggttcttcgggtcggagtcgggaatgatgccgcgtgcgggcagggtcgtgaccacgggagcgccggtcaggtcggccagagccttgacctgtgcgccggcgttggagcgggcggcgccgccacccacatacagcaccgggcggtacgactgagagaacagcttcgccgcgtcggacagcacacggccgtgcgccttggtggtggggttgtagccgggcagaatcatgcgctgcggccatgagtagtacatgtcgccggtctgtgcggtcttggtcagatccacgaccaccgggccggggcggccggtgttggcgatgtagtacgcctcggaaagcacgcgaggaatgtcctgcgcgcgggtcacgaggaaggagtgcttggacaccgggtaggtgatgcccacgatatccgcctcctggaaggcatcagtgccgatggcttgcacgcccacctgaccggtaatcacgaccatgggcacggagtccatgttcgcgtccgcaatggccgtgaccacgtttgtggcacccgggccggaagtcacgatgcacacgcccaccttgccagtggccagtgcgtagccttcggcggcgtggccggcggcctgctcgtggcgcataagcacgaagcggaacttcgtgttgtctttgatctcgtggtagacgggcagaatcgcgccgccaggaatgccgaagacgtcctcgacgccgaggtcctccagcgaacgaatcagcgcctgggcgccagtcatcttctcgccatcgacgatggtctgcttatcgggggccgtgttgattttcggtacaccgctgaatgcctgcaaaggcgtgggtaaagccatgattcctctcacctcataggttttgtcgcgaacctgcccgaccttgggatggggccgggtgcccgcgtgtctgattccagtcgcttccccgagacttgtggccccggcgcgactcgtcgctcatgttggtattagtctattcgcaaatccgacagcgggcttacttagtccgcgtcttgaacgagtccagtgacttccagcccgcttcggcggccgccagctgcgccttacgcttgctggagcccctaccgatgccgatgatgtcgccgttctcgcccaatgagacgcgcgcggtgaagatctgcgcgtattccgggccggagacctccatatggtagacaggctcctccttgccgaggccgtgcgccttgacggtcagcgaggtcttccagtcaagtgccgggccctcggtggccacttcggcgagcgtgtcgtcaataagccggtgaatcaccttgcgtgcctcgtcgatgccgtgttccaggaaggtcgcgccgatgagcgattccacgatgtcgcataggatggagttcttctccgcgccgccctgctcggcttctccgtgacccagcagaatgtaggggcccaccttgagcttggttttggcgatggcgctcagcgcgtcttcggagacggccttggcgcgcatcttggccagttgcccctcggtcatatccgggtgaatggtgaacagcgtttcagtggagaccagttcgagcaccgcgtctcccaggaattcgaggcgttcgtaattggccacgccggggtgctcatgcgagaaggaacggtgggtgagtgcctgcacgagcagatccgggctgagagtggtgcccaacgcttcaagaagctcgttggccggcgtcggctgctgtggggtttcattactcatgattgttgtatggtccttcacgcgatggtgatgtgttgtgttgtgttgtgttgtttgcgatgcgatggtgtacgcaatggtgcacttatgcgaagaccccgccacccgtcgatggcagggccttcattcaagccgttatcgcaggactcacttggtgtgagccggctggatggcggagcggtaggtgcggccgcggtagttaccgcagctcgggcaagccatgtgcggcagggccggagcgccacagttcgggcagttcacggtcgcagcagcggtggccttccagttcgcgcgacgcgaatgcgtgttggcgcgcgaggtcttgtacttaggcagtgccatttgagtatcctctatttcgttcgaacaattgagcttaagcgtccgttatcttaacgcacggctcgtacaaacttcgttcaggcgcgcgtcactcggcctgctcgccgttctgctcggcctcgagctgggctttgagccccgccaatccggcaaaacggatatccgtcacatcgtgatgatggtcgggatcctcgttcagatcggcaccgcactgcgagcacagacccctgcaatccggtcggcacagtggttgcaacggcagcgattcgaccagcgtgtcgcggatcatcgcctcgatgtccgcgaatgcgccgttctccagcagcggatacgtgtcttccgactcgtcctcgccggcgatgatgtcgatttcgtcgtccttcttgctcttgccgcccttgccgttggccttgtcctgacccgactcgtacgggaagaacaccgtcacatcaaccggccagtcctcgtcaatcggcttcaggcagcgcgtgcactcgctgacgaatggcgcgaccaggcggccggtgaagatcaggccgtccacaatcgaatcgaactgcccgctcacgtgtacgggctcaccttccttgattccgacaatgctgtcgccaatgccggaaggtgccgggaaatcggcgtcaatcggcttggattgaccggcgcgcgaagcaatctgcgctaccggaatggcccacggggaatcttcaactcgtgccatggtatgttcttggtgcctttcgtatgttggctggagttattcgttactggcgttattcgcgttactgatgttgccggcgttgctggcgttactgggcttcgggatagtcgttcagcgtcaggtgcggcatctgttcgcgggccgcgcgctggcgctcttccagcacgttaagaccggcctgcacatcctgactgagtttgccgagctgctgggacagcccttccatcaccgtagtgcagtactggtccgcgccttgggtcagatggtcggctttggtctgtgcctggtcaagaatcgcgcgcgctttctgccgtgcaagctcggtgacgttctcttggccggccaggaactgtgcctgttcgttggcgtccttgatcatgttggctgcgcggctttgtgcggaggcgacgatggcgttggactgggtctgtgccgattccagacggcgctcggcctcgcgcatgagggcggaggcgcgctccaactgcaccggcagcattttcttcaactcggaaagctggtcggtgaattcgtcgcggtcaaccttcaccatgccgggggcgaatatgctggacttcgcttcgcccagtgccgcctcgagctggtcgatgatgtcatacaccgtggtgaattcctcgcggctcttgaccgtggccgggtcgtcgtccgtggtttctcgcaggtcgggcatttcgttcatgaacgaggggcgaatgccggcggcctgagcggtctgagcttgtgcccgggtctgctgagctgcttgggcccgcgctttggcctgcatctgtgccggagtgggggtaggcgcggcgggcggcgatccggcgagaacatcggcctcttcggtgggtgccggcgcggcttgcgtagacgcgggcggttccggggcggacggctccggagtggacgatgcggcgtccgcattcggtttggtcagatcgacgtatccagtggggtggtcatcgctcatagtcattagtgcatcagtccttccgctgacgttcctcggccagggcatcggccagcatcggcacgacgcaatcgggcaccatgccggtcacgtcgcctccatggcgggccacgtccttgacgatggaactggagatgtgttcaagaatcggatcggccggcaaaaacagggtttcgatgccagcgagcttgcgattgaccagcgccataccgagctcggcttcatagtcgccgttctggcgcagacccttgatgataacggtggcgccgaccttcttgcagtagtcggtgatcaggccgtcggtggaagaaacggtgacgttcttgcaaccggctttgtcaagggcgcggcggatcacgtcgactctggtggcttcggaaaacatcggtgttttcgcggcgttgacggccaccaccacatgcacctcgtcgaaaaaccgcgccgagcgctcgattacatccaagtgtccggcggtaacggggtcatacgagccggggcatactgcgatagtcatgctttatagcctaccgctagtggtgtgcttcgtgctgccgagcgtgcattgttgtcgcgtcggcgtatgaggcagtgtgtgcggtgccgtatgtggcgtcggtgtggcgtcgtgtgcggcattgtatgtggcattgtatgtggcggggtggcgtgatgcgcgacatgggtgtgtggaggtgtgcggattacgcgccactgggtttcgcgggtaacgacgggaatctatgatggagtgcagtcgaatcgttgaatgcgaggaaagaagtgcaccatgacttttgccgagatgttcgttgatgatgccgaaccgctgcgcaacccggaccaaggtgccggcacgtcggtgctggagcgtccggagaccaaggagtcgccggttcgtgacgatggtggcgacgccgatcgttttgcgcactacgtatccaaggaccgtatcgctgaatcgcgtgcgaccggccgcccggtggtggccctgtgcggtaaggtttgggtccccaagcacgacccgtccaagtacccggtttgccccgactgcaagcggatttatgaggaaatgacgcgctaaaggtggtacttggctcccctcagcgaggggagccaaaatggtcaccgagcggaaatctcgtcgatgagcttgagctcctcgtcgctgaagtgggtgttcttcagcgcgccgatgttgtcgagaatctgctgcggcttggaggctccggtcagcacggaggtcaccttgccgtcgtgcagcagccatgccaggctcatctcggccagcgtctggccgcgttcggcggccagattgttcaggtccacaacctgcttgtgcagtttctcggtcagggcggaatcgttgaggaatcgcggatcgtgagccatgcggctgtcggccggaatgccgttgagatagcggttggtcagcaggccctgagccagcgggcagaaggtgataaggcctttgcccagcttgaaggcggtctctttcaggccgttcttttcaacggtgcggtcgaggatgttgtacttgttctggttgatgatgaacggcacgtgcagttctgccagaattgcggcggccttttccatcgtcggaccatcgtagttggacagacccacgtacagggccttgccggagttcacggcctgaaccagcgcgcccatcgtctcctcaagcggggtttccggatccgggtggtggtggtagaagatgtccacataatccaagcccaagcgttccagcgactggtcgaggctggcgagcaggtacttgcggctgccgaggtcgccataggggcctgtccacatttcgtagccggccttggtggagatgacgagttcgtcgcggtgatgtttgaaatacttggcgagcagcagtccgcagttcttctcggcctggccgggttcggggccgtagttgttggctaggtcgaagtgggtgatgccgttgtcgaaggcggtgaagaccagggacttcatctggtcgaatggcgtgatgtcgccgaagttgtgccagaagccgagtgagacggccggcaacttgaggccggaggtgccggcgcggttgtaagtcatcgtgtcgtaacggtgcgggttgggggcatagatggcggttggctcgaacattgagtctccttacaatgtcattcttgttcttacgaatgcttacctgcgatgggcaaaccgacgccgatcgagtggtattcgtaagtgttcttggatactatgctttcagttaaagtgaacttgaatgcaaacggctgcgacgcttcggcgtgtcgtcgcagtaaggagtcatgatgtcctacaccattcgtcaggtggccacgcagttccatatgcagccctctacgctgcgctattacgaggatcagggattgctgaccaacgtggagcgcaccgaaaccggccagcgtatatacgaagactgccatatcgaccgtctgcgtgcgatttgctgcttcaagaacgccggcatgaccattgacgatcttaagaagttcttcgtgtatgagtccaatgagcccgagcatatcgacgaaatccttgatctgctggaatctcgccgcgaatccttggacgagcagcgccgagccctcaacgaggcggccatgcacgtgcagcgcaagctccattactatggcgacatcaagcgtgccatcgacgccggtgaagactggccggattggcgcgagtacaaaaaccgcgcctattccattgaacgctgagaccatcgaatgctgatccatcgaatgttgaggccatcgagtgctgtgttggatgccggctgggcactaagactgatgtgcgtcgatcatgggcgcgtctatccgagtaaggccttgctcggcagtgcgcggtcgagcagccagacaacgagcgatatcacgaagaacgctatggccagcttgccgcagctaatgccgaacccttgccagccgagtgcgtcaaggttgatgaagtcgtacggatacggactgccgccggccgccggtccggaccccggccaaatcgccgcacgggccagcacgaagaccaagtatgcagggaagtacgccagccacgagaacatgtaatgccagcggaaacgccggtgcgggtcgaatagcacgaaatcgataaccgccataatcggggcgattttgtgcagcatcgtattggtcatgatgccaataacctgtggcacgtatgccgggtcgtccggaggcatcaggaagaacgccaccagtgcggtgactatggcgtacacagtcaggcaccccttaagccatgcaggcggctgaatacctttgagcagtgtggccgcgccggaccacagcatcacgatgcccagcacgaaaccggtctggaacgtgaaatacacccagaactgcggtttggaccatgcctcatatgtgcccacgaagcagaaaccggcgatcgcaaagcgccacaacgccacgatgaatctcatgcatcgagtctaccgcttcgccagtgggccgtatggtgcggctgacgtattggctggtcgtgatgattatggtcggtgtgaccgaccgccatagtgccgatgaatatgacgatactgaacccggcaatatcgaatctggcgatacgagaataagacgagcccttcccgcacggctttgcccggactacacttaggtgcaacttcaccacttatgtaggaaaggccttgcaatggtcgattattcgccggctctgatgaccgacatgtatgaatacacgatgctcgacgccgctctgaaagacggtaccgccgaccgcaagtgcgtgttcgaggtgttcacgcgtcacttgcccgaaggccgtcgctatggcgtggtggccggcaccggccgcattctggatgcgctggaacatttccacttggatgaagcggatctgaagttcctggccgaccgtcacgtggtaagccccgagaccattaagtggctggagaacttccacttttccggtacgattcgcggttaccgcgaaggtgagatgttcttcccgaactccccgattttgcaggtcgaaggcacgttcggcgaatgcacgctactggagacgttgattctatccgtgctgaactacgattccgcagtggcctccgccgcctcacgtatggcgtcggcagccaaggatcgtccttgcatggatatgggcggacgccgcactaacgagtgggccgccgtggccgccgctcgagccgccgtagtgggcggattcaagggtaccgccaatctgctggccgcccagctgtatggtctgaaggccattggcaccgccgcgcattgcttcacgttggtgcatgattccgagcgtgacgcctttgaatcgcagatcgaggcattgggcaagaacaccacgctgctggtggacacctacaacatcgaggaagccgtgaaaaccgccgtcgaagtggccggtcccgaactgggtggcgtgcgcatcgactccggcgacttggccgccatggcccagcgtgtgcgcaaccagctggacgccctgggtgccacgaacaccaccattaccgtgaccaacgatttggatgagtacgcgctcgccgcattgcagaccgcgccggtcgactcctatggcgtgggcaccatgctggtcaccggctccggcgctcccacttgtgcgatggtgtacaagctcaccgagcgtgaaggcgctgacggcacgatggttccggtcatgaagaagtccaaggacaaggccacagtgcccggtcgcaaactggcattccgctcctacgaatacgcgctagccgaagccgaacacgtgatttccggctcggaagagaagctggccggtttcacgcccgaaccgacgtggaagaacctgctggtcgatttcatggaccacggccatatcgatgcgcagtggcagggccatgacgccatcatggccgcccacgactaccgcgccaaggcgttgtccgaactgcccatcaccgcacaaagcctgatgaagggcgagcccgtgattcctacggagactcaggttctctgacgagaactttcgtctccataggaatccgtcgcagcatagctgctccccttacctacggacagcccactgggctgtccgcttaacggttcgaccacagagaccaaagtcctctgaccgtatcgcactggccgcatccctctggttacattggctactcttccctctggatgagtgaaactctcaatggtgataacgcggcgggcaacgatgacgtatcagagcggcgcgatgtagttcgatgatggttgacgagttgctatccaggcatagagcggatggcgtatgctggggcgcatggttgaaatcaaagacatgcttggcaatcaccaaataattcgtgccgacggccgcaaggtcgacgaactgcgccctgtgcgcatcacccgccacttcaccgacgcccccgaaggctccgtgctcatcgaatgcggtaacacgcgcgtgatgtgcaccgccacttttactcccggtgtgccgcgttggcgcaaggactccggcctcggctgggtcaccgccgaatactcgatgctgccgcgtgccaccgccgaacgcaccgaccgtgaatccgtacgtggcaaaatcggtggccgtacccacgaaatcagccgactgattggccgctgcctgcgtggcgtcatcgatatgaaggcgctcggcgagaatcagattcagcttgactgcgatgtgcttcaggccgatggtggtactcgcacggcttccgtaaccggtgcgtacgtggctttggtcgacgcagtcaattgggcggagaagcaccgccatatcaagtccgccagccgcgtgcttaaggactatgtgtccgccgtatcggtgggcgtgatcaacggcactccgatgcttgacctgccatacattgaagacagtcaggccatgaccgacatgaacgtggccatgaccggttccggcaccttcatcgagattcagggcaccgcagaacaccgtccgttcaaccgtgccgaactcggcaccctgcttgacttggccgaaaagggcaacaaggaactgcaagccgcccagcgtgccgctctgtccctagactaagccagctcccctgacaaggggagccttcttgaaggagaacctcatgcaaatcgtcgtcgcaacccataacgaaggcaagcttgtggaaatccgccgcattctcgaagaggatcttggcgcggatgccgaaaacatcgaactggtgtccgctggcagccttcacctgccggatccggtggaaactggcgtcaccttccaggagaacgcgctactcaaggcccgcgctgtggccatccgtaccggtctgcccgctgtcgcggatgattcaggtctcatcgtcgatgtgatgggtaacgctccgggcattctgtctgctcgctgggcgggtgctcacggccacgacaaggccaataatgcgctgctgctcgcccaaatcgaagatattccggatgacaagcgtaccgcgcgcttccgttgcgccgccgcgctggtggtcccggacaccgagaccggtgccgacgtgaccggtggagtggctgccgacggcatcaccgttcacaccacggctgccgatgggagccctgccccggtgcatgctcgatacgccatcaagtcggagacagtggagctcggcgacatgccgggtcgcatcatccgcgaggctcgtggcgtacacggtttcggttacgatccgctgtttgtcccggacgatcagcctgccggtcgcgtcagcactgagcctgaccatgaaggcgagccgctgaccagcgccgagatgactccggccgagaagaatgcgatttcccaccgaggcaaggcgctgaaagccttggtccccgccatcgaggccctgctgcactaagtcgtctaggctgtctagctgcactgagccgcgactaagccacagttgagtcgcggctcagcactcagcccccgaatcgggcgagtgtctagcaagcgcctatgacctagcaagggcgatacgaaagaaggccggcgcttagtgcgtcggccttcttgatgaacaagagccacccgatagaatcgaactaccgaccttcccacgaacgagggggatgctctaccactgagctaaggtggcgtggcttcaagagccaagtagagaatatagcactgcgtttgattcactgcaagccggacattcatcatctttgggccattgttctttggaacatcgtggcggcaatagtgcgaacgatgtgcacacctcatctgctcggccgccattcgtcgtgtgcgcgctatgctagcatggtgagcctgattgactcggaggcaaagggaagcatgcgtgattttgtgctggtgaagttgacagacgaggagttcgatgatttctccgccaggcatccacaaggcaatttccaacaaacctcggcgatgggacgccttcgcgccgcgcaggggatcgacgtcgaatatttggccctcaaggagggcgagaagatcgtcgcggcggcactgttcgaaactcaccgctctcgattctctacatttgcggtcatccatgatggcccgatgtgcgactatcacgacaccgaagcattgaccttcttcatggatgcgctgaaacgccatgccaaggcaaagggtgcttcacagctggaaatcacccctgaatccccgtatcggcttcgcgacaccaatggagcttctttgccggatgaccagaatggcgctcccgacaataagctgatagaacagctcgaggcgatcggcttcactcatggcggtttcaccgtgggctacacggcggttccgcgttggcgctacctcaaggatctgaccggcattaccgatgagaaaagtctgctgaagtcctatgacaagcgcacccagtggagcgtgaagcgtgcccaatcgatgggtgtgcatgtgcgtgagctgtcggacgacgagttgggggtattcgcacgaatcgagcagcaaaccgccgaacgtcgtagcttcgaataccgtggcgaagcatatttccaccgtttcaaggaagcgtttggcaacaaggcgcattttatggttgccgagatccacatcgacgaatatgtagcggacatgacgtccaagcgtgaagcgctttcggccaaggtggcggcattgaccgccaaaaacgccgaacaccccaccaccaaaaccgaacgtcagctgggggaggagacccgcaatctggcggcagccgaaaagcgcctgaacgaggcggccgagttcgccaaagacggggatgtactgccggctgcggcatcactattcgtggagcatccgcgcgaggtcatctacctgttctccggtagcgtcgagcagtacaagcccttctacgcctccgcgctgattcagcatgacgcgatgctgcatttctgcgtggaacacgggctgtctcgctacaacttctacggcatcgacggcgtctttgatgatcccgatgacgaggggcgtggtgtactggagttcaagcagggcttcaacggatatgtcgaggaacttccgggcgagttcgtgctgccggtcaaaccggtcgcctatgccatgaagcaatttgcgcacaagctgctgtcgcggtaaacggacgcagcacacaggccattccagagcccagagtaacgatcagagtaacgacaagtaagaaggttcgattatgacgcaatccgatgcaggcgtcgcctcgctcacccctaccaagatcactcctgccgagctggatgcgttctccgcagctcaagtgcaaggtagtttccagcagacctcgcagatggccgccatgggtgcgttcaacggtccggtggactatgtgggtgtcaagcgcggtgacaagctgattgccgcctgctacgtggtgtacacgcggtcccgtttcggtttggaaggctcggtctggtgcggaccgctgtgcgattatgacaatccacaggtggttgaggcgatgaccgaagccctgcgtcgttcggccaaggcccatcacgccatcagcgtatcctgctggccggccgcagtctaccgtctgcatgatctggacggcaagccgaccagcgacccggacaccacgatgatggacaacatggcccgcttcggttggaaacatggcggtttcaccgtgggctacgaatccgtggtgaaccgctggaacttcgtcaaggggcttgacggcattcataatgagaaggaactgctggcctcgttctccaagtaccgccgtaagaacatccgcattgcccaggattccggtctgcgcgtgcgccgactggaacgcggcgaactgagcactttcgtcaagctgtgcgatatgagcgccgcacgtcaaggcttcaagagccgcgatctggcctactatgagcgtctgttcgataccttcggcgacctgatcgagttcaaggtggtcgaaacccatttcgacgaatatctggacaccctgcaatccaagctgaatgcggcctccaaagacaagcgcaacctcgaacgcctgctccagcgcgcgcaacagcagccggaaggcacggccaagaagggtgcttccgacccggcaacgctggaaaagcgcatcgccaccgcagacaagaagattgcggcgctggaaaagaccatcggcgaagtcaatggcatcatcgcctcggacggcccggtcattccggtggaagccggcgtctacttctggcatccgaacgaggtcgtctgcctgtccagcggcgaggacgatcgtttcatggattactacccgtcttccctaatccacttcgaggcgatgcttgactgcatcgcccgtggcgtggagcgcttcaacttctacggcatttccggtattttcgacgccaacgatccttcctacggcgtctggcagttcaagactcgcttcggcggattcgtggaagagcttccgggcaagttcacgctgccggtggacggactgcgcttcggtgtatccgaagcagcgcacaagctgctgcatcgctgacaaacagtggcgagcacggacacagaaataaggcacaggtgacgacgagatgagcgcgactgcgaatcgaacagatacgacgtatacgtttggcgtgattacgcccgaagagctcgaccggctttccgaagccacaagccagggcagcttccagcaatggtccgggcaggtccgtcttgccaagattcgtgggcatgaagccgaatgcgttggcgtgtgcgacgcatccggcaatctggtaaccggctgcgtgattctgtacctcaatggtcgtttcggtgcagatggctccgtatatttcggccccatcggcattagcgatgatccggctctgctgcgggccataaccgaggcgattcgtgaatcggcccgtcgccaccatgctgtttccgtggcatgctggcctaacgtcgcctaccgtctgtattcctcgaacgggcagcccgacggcgagccgaacgatgcactactggccggattcgccgatgccggctggacgcatggcggattccataccggttatgacgtggtctgccagtggatgtacgtcaaggatctcaccggcatcaccaacggcaaggaactgctggcgtcattcggcaaacgtgctcagtggagtgtcaagcgggcgcagtcgatgggtgtgcacgttcgtgagatcggccccgacgagttcgacgtgttcgccgatatcgaacggcggaccggtgaacgccgtgggttcgcgacgcgtggcgcggactatttccgccagttcaagcaggcgtatggcgcagatgcgcatttcatgctcgcggaaatccacatcgccgaatatgtggcggatatgaccgccaagcgtgaggcgttgcaggccaaggtagctcgattgcaggcgaaatacgatgaacgtccgaccacgcgtatcgaacgtcagctgggggaggaatcgcgcaatctcgcagccgccgacaagcgtctggctgaggtggagggatatgccaggaagggcgatgtgctgccggcggcggcttcaatgttcgtcagtcaccccaatgaggtggtctatcagtattccggttcgttggaggagtacaagccgttctacgcctcggcgctgattcagtacgaagcaatgctgcatctatgtgtggagaagggcgtgccccgctacaacttctacggcatttccggcgtgttcgacgatccgaacgacgagggccgcggcgtgctggaattcaagcagggctttaacggctacgtcgagcagatggtaggcaaattcacgttgccggtggataagttccgcttcggcgtgagcaatctggcgcacaagctgctgcgccggtagcaactggcggtcgggggacgagcctatgtgggctgcgtctcgtctgaccgtgcacccgccgtgtgcctacttgcgcatttgctcacacgcccatcagcgcgtgagccacagccatcatcaccagtgaaatcatcgcggtgattgccagcgagaagccggccagtttggcgttgccgagtactttgtcggtgaacagcgtggagaaaatggcgatcggagccaacgcgcagatcaccatcacggcgcgaatcgaagccgagaacggcagcaggaaccacgcgatcaacgcgaaggcgacgctgaacggtatacgccaagcgatgacggccatgacttccttcacgtcatgcttggattggggcaggtccatgagcatgcccaccatcagcatcgacaccagcgcgttggcgccgctcaatggctgggttatagaggcgatccaatcgggaatcttcacgttggcgacggtcaacacgatcatgagcagatacgtgtcgaacggcaccgagccgaagaagctcttgccgatggtgcgcagcaatgcgcggcgggcaagccgtttggcgtcgcgatccttgggcttttcgtacggtagggtgggagccgaaccggcgtgttgttcggcaagtgttttgccgggctgaatatgcagcagttgctgggtgagcacattggtgccggcggccaccatcacgcagttgccgatatcgaacatcgcagccggcaccaccgcgcccgcaccccagaatgactggacgaccgggaaagaaaaacagccgagattgaagccggcaccgttgagcatcaggaaggcgcggtcggtcacattgcgcttgcgggtggccagaaagatgaacacgaccgggataaaagcaaacaggaatgcgaataccgaaataagcagcagcgagatgtcatgcggattggtggcgaacgagtatacgatggcaccgggcagcacgatgttgaattccgcggtttgcagcacgcgataatccttctgcccgaacaggccgaaccgcttgaacagatagccggcgaggatgatcagcaacagaccaaccggcgtaagaatggcggacatacacttctctccttgactcacacaggctcatggcgcacaggctcagacccgcaatgctgtggcccattatatttgccgccttggcattgccatatgtagaggtgtccgcaagggcttgcagctgccgcgcgcatatacgaaaagcctcccggaagcgttggcaatccaatgcttccaagaggctcaagccggtgcgcgagatgggacttgaacccacacgtcaaagacacaggaacctaaatcctgcgcgtctaccaattccgccactcgcgcgtgcatatccgcgtttccacaggtgtggaagatatgcaaaaccctaggccggacagccattacagaccagccagcctagggcatccgagccacttgtcagaatcgaactgacgacctgctcattacgagtgagccgctctaccgactgagctaaagtggcttggttcgcggaaggcatttcgccagccgcgcacaagaagttaagtataagacatccccacgaaaagtccaatcggcggattggcggttgtgtcgcgaccgctcagtcgaagatgacggttgcgccgcgccgtgaactgttcgataatgcaaacgatggcaatccgacatcgctgactcattttgttctgttcatgtccgaatttgtgagtattctgtttggtgatacggagcgcatccgagccgtgtgcaagggcgctccagtcactgatgaaaggaatggaatcctatggccatcaatccgcccgttgacgccacccagacccctgagtgggctgccctgcagaagcactatgacgagcttcaggtcgaaggcgtgagcctcaagaagtggttcgccgaggacgccgagcgcgtcgagaagctgtccttcgacgccggcgacctgcacttcgatctgtccaagaacctgatcaagccggaaaccctccagctgttcgccaaccttgccaaggccgtcaagctcgatgagcgcaccaaggctatgtacacaggcgtgcacatcaacaacaccgaagaccgcgccgtgctgcacaccgcgctgcgccgcccggtcgaagacgagggcaagtacatcgttgacggtcaggacaccgtcaaggacgtgcgcgagacactcgacaagatctacgctttcgctgacgacgtgcgttccggcaagtggaccggtgtgaccggccgcaagatcgagaccgtggtcaacatcggcatcggcggctccgacctgggccccgtcatggtgtacgaagctctgaagccgtacgctgacgctggcatctccgcccgctacatctccaacatcgacccgaacgacctggccgagaagaccaagggcctcgacccggagaccaccctgttcatcatcgtctccaagaccttcaccaccctggagaccctgaccaacgctcgcgaagcccgcacctggctgctcgaagagctcaccgccaacggcgccatcgccgagggcgacgaggctcagaaggccgaggccatcaagaagcacttcgtcgccgtctccaccaacctggagaaggtcgaggagttcggcatcgacccgaacaacgcgttcggcttctggaactgggtcggcggccgttactccgtcgactccgccgtcggcacctccctggccgtgatcttcggcccggctcgtttcgaggagttcctgcacggcttccacgagatcgacgagtacttcgccaacaccccgttcgagaagaacgtcgtggtgctgctcggcatgctgaacgtctggtaccgcaacttcttcaaggttgcttcccacgccgtgctgccgtacgaccagtacctgcaccgtttcccggcttacctgcagcagctgaccatggagtccaacggcaagtccgtgcgttgggacggcacccccgtcacctccgagaccggcgagatcttctggggcgagcctggcaccaacggccagcacgccttctaccagctgattcaccagggcacccagctcattccggccgacttcatcgcgttcgtcaacaccccgaacccgaccaaggacggcgaccaggacgtgcacgagctgttcctgggcaactacttcgctcagaccaaggctctggcattcggcaagaccgctgacgaggttcgcgccgagggcactccggaagagatcgttccggcccgcgtgttctccggcaaccgcccgaccacctccatcttcggcgtggcactgaccccgttcgcgctcggcgagctcatcgccctgtacgagcatatcaccttcgtcgagggcaccgtgtggggtctggactcctacgatcagtggggcgtcgagctgggcaagcagctcgccaagcagatcaccccggccatctcccaggatgacgaggctctggccgctcaggacgcctccacccagagcctgatcaagttctaccgcgcaaatcgcgaattctgattcgctttgctcggtcagaattcgtgattcgcgcgaccgcggctgtgctgtctggtgggcagtctggcgactgcccacgtcgcgaattctgattcgctttgctcggtcagaattcgcgattcgcgcgaccgcggctgtgctgtctggtgggcagtctggcgactgcccacgtcgcgaattctgattcgcttttctagctcccctcaatactgaggggagctgtcagcgaagctgactgagagggagttatggaacgctccgtatgctcccccctcaactatgactgttgccggcggcggaactactggaataatcaccgtccatcggactctcacctccttcaagccgtgcgctgaaacgccaaatcaataccatcgtcggtatccatgcgaccagcaggagggacggaaagtattcgaatccgccatccgtgctgcctcggccaaactgatgcgttaataacggagagagacgacgacatgccgatactgtccgcaataatccgtaaaatagtcgattgctgtgtcgagaagtgggccgccgcataagcccgcgtctccatgggtccagtccgaacggccgcaaggcctgactttcggcggatcggcaggcttcccaagggcaaacccgagggataacgagaacaggccaacgtacgcgatgcgcaatcgcgtggatggccccagatctgtggctgatatgcggcagcactgaaggaaaacaatggttaacgctgttgaggcttttgacgccaagcacatgaagccggccgaggaaatcccggccttccgtcccggcgacaccgtcgacgtgaacgtgaagatccaggaaggcaacaactcccgtatccagaccttcaccggcgtggtgatcgctcgtaagggcgctggcgtgcgtgagaccttcgtggtccgcaagatcagcttcggcactggtgtggagcgtcgcttcccggtgcactccccgtccatcgactccatcaagctcgtgcgtaagggccgtgtgcgccgcgccaagctgtactacctgcgcgctctgcgcggtaaggccgctcgtattgccgagcgccgcgacaactccgctaagtgagtcgattcgcgggtgcaatcgtgagcctgatgatgcaggcacgcgaataaaccgtgaaattcagcccggaaccgtttcggtttcgggctgttttcgtattttccacgtatgatggacgggcgccggcacccctcatatccggcagcatgaatcgcgaggagatggtatgcaggacgatcaggataacggcgaattcccggtttccgacaatccggagagcaaccagacctcgtatgatgacgaggccgatgcccgcgattcccgcacgttccaagtcgctgaccacggcatcgccctgtccccggttcccccggcaccggcgcgcccggcgcacgccgcttcttccgctggcgcgggtgcagccgctggtgcgaatgccgcggcagcatcatcgtcagatgatgaccacttcaccctacgcgactttttcctgtggtgcggcgttcccgtgcttatcgtgctgctgattcgcattttcgccgtcggcttttacgagattccttcgcgctcgatgatggacaccatggtgcccggcgatcgcgtggtgaccagcaagctcacccccaagatcttcgatctgcagcgcggcgacgtcgtggtattcaaagatcccaacaactggttgaacgaggagcagagcagtgctcccggtggcgggtatctcatcaagcgactgatcggcctgcccggtgacgtggtcgaatgcaagggcgcgggccagccggtgaccatcaacggcgtggccatcaatgagacctcctacattcgccccggcgtggacccgagcgccttcccgttctcggtaaccgtgaccgagggccgcgtgttcgtcatgggcgacaatcgcgccaattccgccgactcccgctatcatcaggatgacggcgatcgcggcttggttcccatctccgatgtggtcggagtcggaatcgcgaaatactggccgcttgaccggcttggtgcgattgatgaccaccacgaagtcttcaaggacgtgcctgacgcttccggctcgaattcctgagtctttttttgaaccgtgtgagtctttgaactgattgagttccgggccgtctgaatcctgaaccatatgaatcctgaaccgtctgaatcctaaccattgtgagacgatgggagccgcgcatgattaccccgacacttgacttggaacgcatccttgcggcccagggctatgaccttatcgctggattcgatgaagtcggccgcggcgcgctcgccggtccggtgatggtcgggtgcgccgccatttgggcccgtgatttggagccgttggatggcgatgatgccgtcgaactgtccgggcggacctacctcggcgtaccggacggcgtggccgactccaaaatgctcaccgaacataggcgcgaggcgattttcgacgaactgcgcgactggtgcgcggcctacgccgtaggccaggccagcaacgccgagatcgacgaatggggcatcacctacgcgcttggcgtggccgccctgcgcgcgctcagccaagtcgaacgcgaacttggcttacggcttggaggggaatcgacgataaaaaaggcttcgggggagtctgcgggggagattgtggaaggtcgtccgggaggctccgtaggggaatccattagaaattgcgggggaagcgttcgcgctctgcccaaagtcgccggaattctcgacgggccgagcgattacatcaccaaggcgctcaacacgttcgacgcgccggacgtgccgattccagccgacataacgaccaaagtcaaaggcgaccagcattgcgccaccgtcgccaccgcggcggtcatcgccaaagtgacccgagaccggctgatggtcgacctcgcgcaaagcaacccacgttacgccgcctacgaatgggctcataacaagggctatggttccgccgcacaccgtgccgccatcgccgaacacgggccgactccgctccatcgtgtctcatggcacctgacctgagccgcgtgcgacacgacagtgtgagcgctaacgcaaaactgttgtggacgcgctaaagtcagtattgattaaggtacaagactggccgtgcatggatgccggccgccagcggggaggttaggcaatatggtgaccagccgcaagccaagcaaacgtccgtccatgttcgaagtggccaagctcgccggagtcagccaccaaaccgtctcccgtgtgatcaatgactcgccggacgtttccgacgccacccgtgcgcgagtccaggccgccattgaccaactcggctaccgcccctccaactccgcgcgcgcactggcttcccgccgttcgcgcaccatagggctgatcgccggaggcctcaaattcttcggcccgatttcctccatctcctccatcgaatccatggcccgcgagcacggtctgttcatgagcgtgatgatggtccacgaggccttgtgcgcgcaggccgacttcgacaacctgtgcgacaccttcaacgagcagaacgtcgacgccttcatcttcctgactccgaccgacgtgatgttcgccgccgcctgccgtgcgcgagtcactcagccgcgcgtcatcgtcaccgccacccacggccaaatgaccgtgcgtgagggattgggccttatctccaccgaaaacaagcgtcgcactgcgctggtcggtatcgaccagtggggtgcaatggccaaagtggtggccttgctgggcgaatacgggcacaaatcggctctgtattttgccggtcccaacgaatggcgcgacgcccacacccgactggatgcgtggcgcaagctcgccgcctcccgatccatcgattcacagatcgtgcgctgccatacgtgggatgcctctgaggcatatgcgcacatgaatcatctcattgatgagtatgggcgtcgaggcgcggcgttgcccaccgcggtcgtcgccgcgaacgacaatcaggccgtcggcatcatgcgcgcgttgcatgagcatgggcttcggattccgcaagacatcagcgtggtcggattcgacgacatgtctggcgtggataacatgtacccaccgctgaccaccgtgcatcccgatttcgaggggctcggcgtggccgccatgcgcgagacgctgcgcttgctgggggagggcggcgagccgaccttcctgaccacccagcacggcatggggctgattcccgccgaggtgcgtgctcggcggtccttgggaccggctcctcggcggtaaattggcgctgttatcaaaccgttatgatgcgtgacacggtataagttgtgtcgaatgcaggttgtcggtacaatgttttttggaaattgtgagcgctaacaccctccccaaggaaggggataacaacgccggcgctccaaggcaaaggaaagatatggcagcaaccgacaacgcggccgagcaggtcgcccacatcgccgagaagattcgcgctggcaagaccacgctgggcatcgaattcggctccacccgcatcaaggccgtcctcatcgacgacaacttccagaccatcgcctccggcgactacagctgggcttcccatctggaagatggtctgtggagctacaccaccgaggagatctggggcggtttgcagtccgcttacgcctccatggccaacgacgtcgagaccgcctatggcgagaagctcacgcacgtcggccacatcggcttctccgccatgatgcacggttacctcgcattcgacgaggccggcgaactgctggtgccgttccgcacctggcagaacaccaacacctccgaagctcacaagaagctctccgagctgttccagtacaacatccccgagcgttggtccatcgcccacctgtaccaggccgtgctcaacaaggaagagcacgtctccaaggtggcctacttcaccacactcgccggttacgtgcactggaagctcaccggtaagaaggtcctcggcgtgggcgatgcctccggcatgttcccgattgacccgaccactcacacttacgaaaccgcattcattgagaagttcgacgctctacctgaggtcgcagcccagccgtggaagctggagaatctgcttcctgagccgctcgtggccggcactccggctggcgagctgaccgaggaaggcgccaagctgctcgatccgtccggtgccctgaagcccggcatcgtgctcgccccgcctgagggcgacgccggtactggcatggtagccaccaactccgtgcgcgtacgcactggtaacgtctccgccggcacctccatcttcgccatggtggttctggagcacaagctcaaggccctccaccctgaggttgacttggtcaccaccccggccggcgatctggccggtatgagccacgccaacaacttcacctccgacctcaacgcttgggtcggcctgttcggccagttcgccaaggccatcggccagccggttgacgccggtatgctgtacggcaccctgttccgcgcggccatcgccgacgacgtggacgccaactgcggcggcctgctgaactacccgttccgttccggcgaattcctggccggtctgcctgaaggtcgcccgctgttcgcccgcagccccgaggccaacatgaccctcggcaacttcatgcgcgcccagctgttctccgcgttctccccggtcaagatcggcatggacgtgatgaccaagcaggagcgcgtgcaggtcgactctctcgtgggccacggcggcatcttcgccactccgaaggtggctcagaagattctcgctgctgccttcaacaccccgatcaaggtcatgtccaccgccgccgaaggtggcgcctggggtatggccgtgctcgccaactacctgtggaacaccaacgaggatcacagcaacctcgctgacttccttgacggttgcgtgttcaaggacgcccagtccaccacggagaagccggtggcttccgatgtggttggtttcgaggacttcttcgcccgcttcaccaagggcctgcccatcgagcacgccgccatcgaaaccatcaacctcgaagataagtaagcctttctgacctccctctattgagggaggtccttgagattttgaaaaaacgtccatccatcacagtggaaaggaaaaccaataatggcaactttggctgattacggccccgaggttcgcgccgaggtcaagcaggttcgtgaggtcgtctccaacctgcaccagcagctgatcaagtggaacctggtcgtgtggaccgcgggcaacgtttcccagcgtctgcacaccgccgacctgttcgtcatcaagccctccggcctgcgctacgagtacctgaccccgtcctccatggtcgtgtgcgaccttgacggcaacgtggtcgacggcaccgaagccccgtcctcggacaccgcttcccacgcctacatctaccgcaacatgcccgacgtctacggtgtcgtgcacacccactccacctacgccaccgcttgggctgccactggtcagaacatcccgtgcggcctgacgatgatgggtgacgagttcggcggcccggtgccggtcggcccgttccgtctgatcggctccgaggcgatcggcaagggtgtcgtcgagaccctcaagaagtacccgaagtccccggccgtcctcatgcagaaccatggccccttcaccatcggcaaggatgctgaaggcgccgtcaaggccgctgccatgaccgaggaagtcgctcacaccatgtgggccgcccgtcagctcggtgacatcatcgagatcgaccaggccgacatcgataagctcaacgaccgctaccagaacgtctacggtcagcactgatttgatggagtgtccgccgcgttacggaaggcccgacgtaccttcgtacgccttcgccttccgcgccttgcggacacacacatcaaatcagcgctgactccgccagcacggtggtgtcttggctcccctctctgaggggagctgtcagcgatagctgactgaggggagcctcggtcggcgaatgaaacttaaacaaacccccataaacaaagaagtaaaggaagtaaccctatggttatggaaaaccccttcgagggcaaggaaatctggttcggcgttggttcgcaggacctgtacggcgaagaagccctgcgccaggtcgccattcactccgctgaaatggtcgactacctgaacaacaccggcaagattccggccaagatcgtcctcaagcccaccctgaagtcctccgacggtgtcaaggagttcatggtcgaggcttccgccaacccgaacgtcatcggcgtcatcacctggtgccacaccttctccccggccaagatgtggattcgcggcctcgaagtgctgaccaagccgctgctgcagctggccacccagcaccacaaggaaatcccgtgggagaccatcgacatggacttcatgaacctgaaccaggccgcccacggcgaccgtgagttcggttacatcgtctcccgcctcggcatcaagcgcaaggttgtcgtcggccactacaccgatcccgaggtcgccgagaagctcggcacctgggcccgcgcctgcgccggctgggatgcctccaacaacatgaaggtcatgcgctggggcgacaacatgcgtaacgtcgccgtcaccgagggcgacaagaccgaggctgagcgcgtgttcggcgcctccatcaacacttgggccgtcaacgagctcgtcgctgcgtacgacgccgtcaaggacgaccaggtcaaggagatcatcgaggactacaaggccaagtacgacgtcgacccggctctgctggacgccaagtacgactccctgttcatcgccgccaaggaagaggccgcgatggtcaacatgatgcgcgccaacggctgcaccgccggcgtcgacaacttcgaggacctcggcgctctgccgcagctgccgggcgttggcccgcagcgcttcccgtccgagtacggctggggcttctccgctgaaggcgactggaagaccgccgtcctcgtgcgcatcggtgccgtcatgggctacggccttgagggtggcgcctccctcatggaggactactcctacaacttcaccgagggtgacgagctcgacatgggctcccacatgctcgaggtttccccgtccatcggcaccatcgccaagccgaagctggagatccacccgctgggcatcggcggcaaggccgacccggtccgcctggtcttctccggcaagcccgccaaggacgccgtcgtggtctccatgtccgacgttcgcgaacgcttccgcctgctcatggacgtcgtcgacgtcgttgagccgcagggctccctcaaggagcttccgtgcgcccgcgccgtctgggagccgaagccgagcctgaagaccgctgttgagtgctggatcaccgccggtggttctcaccacacctgcatgaccacctccgttggtcgtgaggcttgggaagacttcgcccgcatcgccggtgttgagctcgccgtcatcgacgagaacaccaccgctcgccagttcgagaaggaactggagctgtccgagatgtaccaccgtctcaacaaccagcactgattggcggagcgtataccgcctttcctcaggttcgacgtaccttcgtacgccttcgccttcggacggcggtctccgcacgcgccaatcagcgctggcaagccagcactgatgactaaatcagtctgctgactgctaccgctgaaaaggggctgttccgggaaaccggagcagccccttttgctgttatcggcaactccccacaaacgcatcaaaaatcgcctgcgagcgtggatctaccttgtagagaaactcgggatgccactgcacggcccacaggaagtggcttgccggccggtacagggcctcgatcacgccgtcgggcgcgacggccatgacctcgagtccagcagcaggctcacgaaccgcctgatggtgatagctattcaccgcaatctcagtctgccctgcgaacaatgaagccaggggagtgccgggcaccaaggaaacgttatgtccgaacgcatcgtacggcggattcatatggtgttcgatatcgctcggatgctggcttggcagatcctgccacaacgtgccgcgcagcgctgcgttgatgaactgaatgccacggcagatgcccagaatcggcttgtcccaagccattacagctggcagcagaatcgattccattcggtcgcgctcaggagagagcacctcgctacggccggtggcggaggccgctgcaccaaccatcggtcccacatccggcccgcccgtaaacagaaacgcgtcaaaccgttcggcgcattgcgcaagaatgtcggtgtcatcggtcagcggcaacatgacgggcgtaccgccggcccgcattatcgcctccatatatccgggcagcatccacagactatcgcgcccgtaatccatcagcggagtcaccgcaatgagcggtcgattcgtagtcatgcctgcctcttttcgcccaagtgttgttttcgtcgttctgccgcaaatcgcttgattcagtggccaataatgccgccactgtaccgaaccaatgtaaccggtcggccaacattatttcgtcagccagccgcgacgagatcgcacaatgtgccaatgatggggggcattcggtgcgaccttgtcaatgttcgggccattgcactttcagcggggaaagcatgccccgtccgcgcatcatgatgaacgagtaaggttgacggggagggagaatcacatgaaccaggcatgcgtacgcaacgacaccatcgacgcgggcaaccatcatggccgaccgcaataccggtcgttcctgcgatttctgacatcgcaggaacgcaacgtcatttggctgttgctggccattgcttttcttccggtggacggcaccacgcttggcctgtacgcgccgttctggtctccaatcagtccggcgctgttcgccgtgtactgcctatgcaattggcggcaactgcgcatcgcagccaaccggtacctgccaatgttcctcctaccggtggcctgcataatcctgtccatcccgggatggctgaagttcggcatccacctcaacgccgcgttcatgagcatcaccggattgctgggcgtgctcgccactttgggtgcgatcgcccttgcgttcgacatcaaacgcattccgtggcgtacgccattgcggattctcatcgcatcatactgggtttccttcggagtgggcgtcgtgcaatggctgtccatccgtctgcacgccaaaccgttgaccgactatttctcgcacctcatgtaccggcaatacatcagcgacaactcggtgtggggcggcggccgtccgcagttcctgttcgccgagcccagctatatcggcatgcacctgttcggcatactgcttccgctcatgtggctcatgcgcgggcgcgaccgcatctacgtcaaacggctgcgtgacctcatcgtcacgtatgccgtcggcgcggtgctcatgcaagccggcaccagaatcgtcatcgattccgtcgtggcgttgctgatcgcccttgtggcgcgcaccgattggcatgacggcgcacgccgcgtccggggcatgctgcagattctcggcgcatgcgcactgggcctgctgggtgtgctggcggattccagactctccgccatcgcggaaaacggggccgagggagacggctcgttcttcgcgcggatctaccaaagcctcgatccgatatgcggattgctcacccatccgtggacgctgctcaccggttatggcgcgggcaacatcatcaatgcggtgtgggccggcgcggccaaagccggacggctgctggacggtcttggcatgaacggcggcgcggccacgggattcgcggccggcgtgaacgcggacacggtgtggacgatgtgcgcgtataccagcgtcatcgccgaatacgggctgatcgggctggccatgctggtcggagcctcgatggtctgcatgacgcgcgggaggacggtatgccgtggcggtgcggatggcgcatcgtccgacgagctggcgcacggtgtttgtgtcgccgacgttgctgatgttgccgggggtaatagtggtggtggcgttgccggcgcgggttcgggcgaatccggcgtctggcacaagaccgtcatctgctggctcgtcctggtcgcatacctgtacatccaatgcgagaactatgcgttcgccgctctgccgcttcttgtgttcgccgcctcgaaggtgaggcgcgagcctgatttctcgcgggccgacgcatcgacgcggcccgagatggaccaaaatccagaataaccgacattcgccgctgttccgtttttcgctcaaggcgtatatctcccgtatcttgaggtgcatcatgtatcgtcgcggctaactaatcggcgaaacgcggcatgtttcgcattttgggcgaaaagcccaagtcccacaggaggtattgatgacgttcgttgcacggtcggtgcgctatgtgctcagaaaacgagtgcgaaccacagtgctccttataatactgaccatcataacggcgagcatgctatccacgatcgcggtttctcgggcagctcaacaggccgccggacgaatcgagaaggaagcggtcggtggatttgtgctgtccagcaacatgcagggcagcatgctcacgcctcgcggaggcggcatggtgcgccccgccgacgtgcgcaggatcgcccaactgcccggggtcgattcgtatatggtccgtcagaacgccaccgccgatctcgtgggggcgaatgtggcgaaggtccccggcggcgatgattacgatgcgacccaggagcagcagtttggcaacgccgccaacgtcatgggcacgaatgattcgtcgaaactcaacgtgttcacgtcgcgcacgctcggcatggccgaaggacgacatctgaaggcctccgacaagtacacgtcgatgatccatgaggatctcgccaaagccaacgggctcaaagtcggagacacgctcacgctcaaggccaacgcctatgacgccgacaacgaatcacattcgacggcgaccgtcaagaccaccatcgtgggcatattcaagggcgacagcgccagaaaggtatccagccgagcggaactcaccgccaacaccatctacaccgatctggataccacacgcgacctgtaccagtacaaggacggcaaggaaatataccaggacgccaccttcgtgctgtccaagggcgttgacgtggagaagaccatggatgccgcgaagaaactcccggtggattggaacaactatcagatcacgcgcaacgaccagtattcatcgagcatgctgcatgccgcccgcggcgtgcgctccatgatgcgcggcgccctgatcggcgtgaccgtctcggccgtgctcgtgctcagtctcatgctgctgctgtggatgaacgaccgccgtcaagagatgggcatactggtgtcccttggcgtcggcaagccctccctggtcgcccaatacctcaccgagatggtgctgatcggtctgccgtccctcgccctcggctggctgtgcgcgcagggaatggcccaatggctcggcgccacggcgctccattccgtgaacgcctccgcggcgaaggagctgagcagcatggggcaggtcggcggcgatcttgaatccagcatgtcggtgcgcaccctggattcgctcacggtgtcggtcgacgggaccgccatgctgtacgtggcgctcggattgttggcggtgatgctggtgtgcgtcgcggtggcgtgcatgccgatgctgcgcaaatcgccgcgagacctgtcggagattcgatgatgagcatgaatgtgtggaagcgtgccacgttggcgatcgtacgcaagccggtacgtagcggcatcatcggtctgctgatgctgatggtcttcacgagcctggtggcgcaggtcggagtctcgacggccctgcgtaccatgtccgacggcatcggcgcgggcatgggcatagggtttaccgtcagcgccggcgagaatcccattagcgccgaggaggcgagccggttctcgcgtatccccggtgtgacgaagaccgcctatgcgacgaagaccttggcgcaggtggatggcgcgcgcccggtcatgccccggcagggcccccgattggactccgatctggccatgcaggtcagcgtgctgggcaccaccgattcctcattgtccgaggaattccagagcggcctgtaccgcctggagcagggccgccatatctcgggcgacggcgacaatgtgctggtccaccgcgacttcgcgatgcagaacggcctatcggtcggctcgacattccgtctccggcaggaggggcgcaacgccacggtgcgtgtggccgggatcttctccggcaacgtgcaggcccaaagccccctgccctcggacacttccgagaacctcatctattcgggtaggcgagtagcttccgctctgaccggaaacgaccggatcgacatgatccgatgcctgtcggataatccgcaggacctgtccgcggctattggacgggccaagaccatggccggcggcaagtacgacgtcgccgacgattcggcccggctctccggcgtcctgcaatccgtgcagacggtgcgtaatctggtgcgcatggtgctgctgtccgtctgcctcgcggacgtactggtgctggcgatggcgctggtcttctggattcgctcacgcatccatgagataggcacgcttctggccctcggcatcgacaagatgcggatcgtcgcacaactcgccatcgaaaccggactcatggcggcggtcgccgccctgtgttcgctgggcaccggcgccatgctgtcgggatacgtgtcttcccgactgttgcgcgattcgggcgtcgcgccgttggaatcgttgcacgtggaggccttgccgcctgagcagacgatgctcatcctgctgctcggatgcgcggtcatcgccgtggctcttgccgtgtcatgcgccgccgtgctgtccaaatccccgaaatccattctttcctctatgcgttaggagtcaccaatcatgtctaactgtctgcaactggaccatgtcgattacgcctacggcgcggcgaagatccgtgttctttcggatgtcagcgcggatttcgaatccgggaagatgtatgcgatcaccggcccgtccggcgccggcaagagcacgctgctgtcgttgctggccggcctggacgccccctcccggggagtggtccgcttcgaaggggaggacatcgccgcatcgggctatgcgaagcaccgccgggagcacgtgtccctggtgttccaggaccataacctgatcgactacctcacccccgaagagaacctgcggctggtcagcgccaaggccgatatgaagatcctcgaggaactgggtttgagccgtgaggaatccaagcgcaacatcatgcacctgtcgggcggccagcgtcaacgggtggcggtcggccgcgcgctggtcgccccgggccgcgcgatcctcgcggacgagccgacgggcagcctcgacccggagatgaccgacgaggtgattcatctgctgcagcacgccgcccatcagctcggcaaatgcgtgatcgtggtgacgcattccaagcgcgtcgccaactccgccgatgtcgtgctgcgtctcaggagcaagaaactgacccgggcatgacccacctgggccgggcggcaccccggcgacgacccgcatggaatcatcgtcataatgacgcctgcgatccctggacatgagaaaccgcacctccgatcatcgaatctggattactccagtccaacaatcggggtgcggttcaaaaggccctttttttgtgtcggattacgaaccgcgcgtctcaccgcttgccgttgtagatctcgttgtcgatcacatcggcgaacacgcgattgacggccgggcgcaccactttcagcgacggtgtcaggcacttgttctcctgcgtgaactgcgtgtccagcacggcgaacttgcgtacggattcggcgcgcgagaccgtcgcattcgccttgtccacgtactgctgaatctcctcgcgcaccgcggcgttcgtggcgagccggtcgaccggcgtctccgtggacaggccgtgcgcgggcagccacaatgccagcgactccggatcgagcgtcaccaacgcgccgatgaacgggcgctggtcgcccaccaccacgcagtgctccacgatcgggcacttggcgatctcttcctccagcggaatgggggagacgttcttgccgccggcagtaataataatgtccttgatgcggccggtgatgacgatgtggccctcatcatcgatctcggccaagtcgccggtcctgagccagccgtcggcggtgaacgcctcggccgtcttctccggcagattgtggtagccgcggaacacgttcgggcccttgacctgcagttcgccttcgtcggaaatgcgaatcgaggagccgggcgcgggctggcctacggtgccgatcacattgtcggtcacgcgcgtggcggcgaacggggcggcggtttcggtcatgccataaccctgaatcatcggcagtccgatgccgttgtagaaatgcgccagatcgagcgacagtggtgcgccgccgcaggccacgtacttgatcttcgggcccagagcaccgcgcaccgtgcggtagacgagcgtttcgtacttggcgcgctcggcgatttcggcaaacgtgtgctgctcgccggcctgctccttgcggctccagacgcgcgcggcctcggcggccttgacaaacaggcggcccttccagccggcaccggccttgtgcgaggcggcgttgtataccttctcgaacacgcgcggcacgcccagcaggtaggtcggttcaaacgaacgcaggtccggcagcagggttttggtatccggcagataaccgaccacgccgtcatcggaggcgatggaggcgtactggatgaatcgtgcgaagcagtgggccagcggcaggaagagcagcaggcgcggatggtcgtcaagcaccacttcatgcaacgcctgcgaggcggagatggtgatggacacgaagttcttgtgggtcagttcggcacccttcgggttgccggtggagcccgaggtgtacacgatggtggccaggtcgcccgtgcgcacggtggccacgcgctcgttcagttcctcgtccgaaacagccacgcccagaccttcgagcgcgcccaacgcgttgccctcgatcatgagaatctgcttcaaggcagggcagtggtccttgaccgagtcgagccggtcgaagcgctcgcggttgtcggcaaaggccagcttgaccgccgaatcgttcatgatgcgctgggcctgcggggcagagtcggtgtcatagatcggcacgcttaccgcgcccaccgcggccagtgcgaaatcgagaatgccccattcgagacgggtggaggaaaagatggtcaccgcgtcgcccttggcgatgccgagcgcgatcaggcccttggcggctgagaccacgcgctcgtggaattcgccggtggtgacgttctgccagcggccagggccgattttcttggcggcgattaccgtgtccgcgccggtgcgggccagtcgttcggtgagcagtgaatagatagtttggtcatcgcggatctcgatggattcgccgggcgtggtgtattcggtaagcatacggccgtttattccttacaaacatgatggcaagttgacaacccgagccattctgacgagttagattacgctggcgtaaggttgcgcgcgttgtgggcaatggagaagttgtctgtctggttttgtggattgtatacaacgccgtgtctaaccggtttgctctacggttatgaccgtgtccatttcgggagccatcgacttcctgcaggacaagtacgtgctgagcccggccctgcagggtccggtcatcagctccagcatcatcggcggcgtcggcattggggagtctgtggcttcttatttgggaacgaagctcagcgtgacagtcgtctcagctgaaggtctggcgtgtatgtgcgctttcgcctaaggtaaataggattgcgcagtgcacgccatcggtatgtgcaggtatgcgattggtggcacccgcgactgatgcatgacgagacctactgcagtaccacggcaaccaacaccgcaacaacacggcaaggggaagcgaaccatgttcgacaaacgactgttccaattggcaccaggtctcggcaagctcatagccggcaaagtggctctgatgtgggttgggctgcttgccaatatcggcttcatgctttcgctggtcatgctgctgcaaggactgctcgccgcagccgacccacacactttctcctgtaacgccgcctcggcctccgagtgccccgccaatctgttcggcgttccgggcaccaccgtcgccccgatggccggcgacctcatggtttacgtggccttggcgatcgtctgcatgctggttcgctacctggccaccacacacgccacacgcctcggcaccgaagccgccgaacgggtcaagctcgctttgcgttccaagctgtaccgcaaaatggtggccctcggcccgtcctacaggtcgcgcgtcaagacctcggatgtggtccagtccgccggcgaaggcgtcgagcagattcaaagcttcttcgaactgttcctgccgcagctcttctatgcgattcttgcgccgatcaccctgttcgccgtgattgcgccgatcaacatgccggccgccgtgaccatgctcgtctgcgcgccgctcattattattgtcaccggcatcgtatccatgaccgccgcccgcgccttcaaaaaatactggggccgatacaccgacatgggtgccgcattcctcgacaacctgcaaggcctcgaaaccctgaagaacttcgacgccgacgaccgtgccgccgtcgaaatggacaagaaggccgaaggcttccgcgtcatgaccatgcgcgtgctgcagatccagctgcgctcgctgaccgccatggatatcgtggcctacggcggtgcggcggccggcattggtgtggctctatggcagtatgcgcataccgccgcggccgccgcaggagccagcgccgccggctggtcgccggtcatgctcgccgcccacctgcccggtgcgttcgcctacctggcctacggcctgcaatacctgatgccattcggagcgggcttcccgctcaccctcgccggactgttgctgatcgtgctgctgtccgccgaattcttcatccccatgcgccaactcggctcctacttccacgtggcgatgaacggcatgacctccaccaaacgcatcttcgccctgctggacacccccgagcccgcccacggcactgccacgctgccggccaccgctggcaccgatgccgggactgatgccggtaccaaggccggggccaaggccgatggcggaatcaccgtcagcttcgaccacgtcggctattcctatgacagcgccgattccggtgccgccattcaacaaacgaattccgcgccggcacctgcgctcaccgacctcaccttcactgcctaccccggtcaactcaccgccatcgtcggcatctccggttccggcaaatccacggctgccgcgctgcttgccggtacgctgaccggataccaaggctcgcttacgctgaacggcgtcaaggtatccgacctgtccggagagacgctcgcccgaaccatcaccctgatcggtgccagtagccatctgtttgccggtactctgcgtgagaaccttctgatggctttgcccgatgacggccagaacggtgacgccgcgtccgacgccgtggattcccgtctctgggacgcgctcgaacaggcccgtatcgccgacttcgtgcgttcgcagcaggacggccttggcatgacgattgagcccgacgccgccaacctgtccggtggccagcgccagcgcatcgccatcgcccgtgcgcttctgcacgattcgccggtgttcgtattcgacgaggccaccagcagtgtggatgtggaatccgaggaactgattctcgcgaccatccgcgaactggtgcaatcccgcagcaagacggtgattatgatcacccatcgcatggccaacgccgagcacgccgaccaagtggtggtgctcgaacacggcaagtcggtggaagccggcacgcatgccgaactcatggcggccggcggcgtgtacgccaaattgttcactactcaggcggatatcgagaactttgggggtgacaaccctcagccagcttcgctgacggcttccgccagcgggagcggggcggctgtgggcgcagctccggctgcagctccggccgagatgagcacgttccaggtcatcaagcgactactcggggaggccaagccactggccgggcttatggtcgcggcttccacggccggcaccatcggccaccttgccgcaaccttcctaccggtgttcggcatcatcgccggattcgcgctcgccggcaaccccgtgtggggcatgagtgcggccggtgcaatcaccgccatgattgtttgcgcggtgttgcgcggcctgacgcgatacgttgagcaatatctgaaccacaacgtggccttccacctgctcgcgctcttccgctccaaggccttcgccgcccttcgccgcctcgctccggccaagctcgccggcaagggcaagggcgacctcatcgccatgctcaccaccgacgtggaactgctcgaaatcttcttcgcgcataccatcagccccgtggccatagccgtgaccaccaccatcgtctacgccatcgtggcggccacgctgagcccctggatggcgttggcgctgatcgtctcccatctgatcatcggcatcattgtgccgcgcttcttcgccaccggcgtgcgcaatctgggccccgccatccgtggcgcggccggcgaactcgacaacgtgatgctcgacgacatgcgcggtctcgacgagatcatccgattcggtcggggtgaagatcgtgcgcaggccatcgaagaccgcacgcgcgcgctatggcgtgaccatgccaaactcagccgtgtcaacggccggttcgccggtgtcggcggattgctggttgcattgcttacctcggcggctgccggcatcgccatcaatcttgccggcgtgaacctctacgatatcccggcgctggtcgccgccttcgcgctgctcgccagctcgttcgggccgacgctggcgctcgccgccctgcccgcgaacctcacccagaccttcgcctccgcccgtcgtctgttcggtctgatggacgaagcgccggccgtggtggaaactggcactgcgaactcggattatgagggcatgcgccttgaccgcgtcaccttcgcgtacccgggggaggagatcgagacgattctcgccgacttctcgctcgatgtgccgcagcacggcatcctcggtatccaaggcccgtccggccggggcaagtccactatgctgaagctgctgatgcgctattgggatccgcagcgcggccaagtgacgctgtccggcacgccgctaccgcaaatcgatgtgcatgcccgccgccgtattcaggccatgatgagtcaggagacccacctgttcgacggcacgattcgagagaatctgcttatcgccttgcctgaatcggagattcgcaatgggggagcggccggtgttcttgtcgcccgactccgcgaagccctcgccaaggcatccgtgctcgacctgatcgattccctgccggatgggctcgacacccaggtgggcgagctgggcgaccgactgtctgaaggcgaacgccagcgcatcggcttggcccgtgtattcctgcgcaatgccgacttggtgctcttcgacgagccgaccagtcgtctggatgccttgaatgaagccatcattctgcgttccattcatgagctgtccaagagcgagcagaatgcggataaggggcaagacgtggctgtggtgctggtctctcaccgtgaatccgccatgcgcgttgccgatgcggtgctgaatctgtaaagtcgcacagtcacaggccgcaatactctgcaatacaggatttccttatatatcagcctctgataagggtatccagagagtcgagggccgcgtcgatggcctgagcctcgcggtcgtcatccgtctcggcgaaggaatgctcgctgtaggaatcctcgtcggcactgggcaacaacactccgcgaggcgtatcggcactgtgcgcgtgcccaatagaggccatatgtgccggctgcacggcatttgtctgcttgcggtttcgattcgcgtcattcgcggaatcaacggcatctgcggcatcaacgctatctgtatcatccgcaccactgcgcgtagtcggccgattcgccagcgtgaatggatcgtcgggcagtgaatcggccaaggccgcgactgctgcgctggccgctgcctcggccgctgcgccgtccagcatcgcaccatccgcagagtcagtcacggagccatccacagagccatccacagagccatccgcagggccgttcgcagagccgtccgtatactcaccgtcgtgccgtctactggatgacttaccaaccagaacagcgcccctcgtacgccgcataagcgacggcacgttctcatccgtcgtaacttccgagacggtcgctgccgtgtcttcttctgcagccatattcgccgctgccttggcggcttcctcggcagcgcgctgcgccgccagccgttctgcctcggcccttttggcggtctctatggcgaaaatcttctgctgtgccgcagcgcgagcccgctcagccgcatccataatgcccaatgcctgctgacgttcgttttcaatacgacgcagcgtggcttccgcgtggcggatattcgcatcagccgtgctcagcgcgtattttgcgtaggccaaatcggttttcggctgccatagatgctcgatttcctccagcgtgcgtcccattgtctccggcaccaacgccacgatgccgaacaggcaaatcagatccagaaccgcgaaaatcgcgaacgatatgccgccgcccaatccatcgatcatcatcggcgtgaattgtgcgatgatccagttggcgaacagcagacacatcacacacaatccggtggcgcgaccgcgcagatacgtggggaagagctcgggaatcacaatccagggaatcggtcccatcgaaaaggcgaacgatatggtgaacgccatgacgaatataagcgtcagcagcgaattgcccatgaaatacgagcccgaaatgcatagcgcgaacacgcacatcatgccggtgcctatttccataagacgtttacggccgaacgtgtcgatcaggtacatgcctaccacggtggccaccagctccacgccgcctacgctggcggccgcgaggaactgagtgtccccggcgaacccgagatccgagaacatcaccggcccatagtaggagatggcgttcatgccgatgaactggttgaacacggcgagaaagatgccgatgacgagtgcccgtcgcaggcctggacggaacaaatcatggaattcgtgcgacatctcggtttccagtttgaccgaggcttggatgtcatcggtgcgcaggcgtgcgcgttcggtgccgaggatgtgctcgagcaccgcgaaaccttcatcggttctgcctatctgaatgaggaatcgtgggctttccggtgccctccgcatagccagcaggaaggcggcggctggaatcgcgcctaatcccagcatccagcgccatccagtggcgatatcccagtcgtttgatccgtgggaggcgatgatgtagttgatgacgttggccaggaagataccgcaaaccgcaagcagctgataagagaaggcgagcagaccacggatgttggccggagccgattcggtgatgtatgtgacggccagcgcggcggtcaggccgatgccgtagccgccagccacgcgtgccacgataagcgctatggggcctatcgccagcgcactccatacagccgcaacgaggaagaacgcgccgccgataataaggatacgttttctgccgaatcggtcggaaaggaatccggcggtggccgctccgatgacggcaccgagcatgatggaggagatgacgaggccctccatgagagtactgagcccgtatctggcgtgcaggaattcgatggcaccggagatggagacggtgtcgtagccgtacagcaatccggcaagacccgcactcaaagtcagtccgaatatatatttacctgatccgcgggtgcgtatggctgtccctaaaggattgggctgcttggaagcagtccgaaacagtcccgccatgtgctcttcctctcaatacagctatgggggtgcctgttcatactagccgaactggctccgtctggcgctggacatccacgaatgtgaacgctctcggaattgtggatgtcggaagctgaagattcttctgtgtgcccgaggtggcgagttttggcggaaaatcaggcgtgtcgcttgattttgacaaattggtacacgggtgtatcatcatagatattggtacacgggtgtaccaaagaaaacaccccaaaaaaagaccgtcagcggagcatatcgcaggcgaggaacccaggcccaaggtaagttcaaagtcccgaagccacgaccaatcccaacggctcaggaggagataacatgcgcaacaccaagaaggtcatcgcagcaacggccgccgccagcaacatagcatcggccataagccgatacaataaaggacttggttgatatgactactcgcagagcattccgttggccgtctttgctgacgccgaatggtcgtggcatcgcgttcggcggtgactacaatccggatcagtggccggaggagacgctggacgaggacatccacctgatgacccaggctggcgtcaacactgtggccctcgccatcttcagctgggacaagatcgaaccgcgcgagggcgagttcacgttcgagtggcttgaccacgtgatcgacaagctcggcgcggcgggcatcgccgtggacctggcatcggccactgccacggccccgttgtggctgtacgagcgtcatcctgaggtgctgccaatcgatcggtatggccatgtggtcaatgcgggctcacgtcagtcgtggcagcccacaagcccggtgttcaaggaatacgcgctgcgcctgtgccgcaaatttgccgaacactacaaggacaacccgtatgtgaccgcctggcacatgggcaacgaatacggctggaacaaccgctacgactactccgacaacgccttggccgcgttccgcacgtggtgcgaggccaaatacgggaccgtcgacgcgttgaacgaagcgtggggcacggccttctggtcccagcacgtgaacagcttcgacgaggtgttgctgcctcgccacatgggtggcgacagcatggtcaacccgccccagcagttggattacgagcggttcggcaacgacatgctgctcgacttctacaaggccgaacgcgacgcaatcgaagaaatctgccccggcaagccgttcaccacgaacttcatggtctccaccgaccaatgcaccatggactacgcgcaatgggcaaacgaagtggacttcgtgtccaacgatcactacttccatgagggcgaatcccatctggacgaactcgcctgctcggacgcgctcatggactcgctcgcgctcggcaagccgtggtacgtgatggagcactccacctccgccgtccaatggaagccgcttaacacgcgcaagcgcgccggcgagctcatgcgcgactccttggcccacgtggccatgggtgccgacgccatcaacttcttccaatggagacaatccgcatcgggtgccgaggcgttccactccgcgatggtgccccacgcgggctccgatacgaaactgtttcgaggagtgtgcgaactcggcgccgcgctgaagacgctgtccgacgcgggtgtgcaagacacggaactgaagcgcgcggacacggcgattctgttcagtgcggaatccgaatgggccactcgctccgagaccctgcccagcatgaaactcaatcactggcatgacgtacgcgactggtatcgcggatatctcgatgccggagcgcgcgcggacgtggtcccgctcgcctacgattggagcggctaccagactatcgtgctgcccaccgtgatcgccctgtccgacgaggatacccgtcgcatcgcggacttcgccgaaaacggcggtacggtcatcgtcggctatgccaccggcctgatcgacgaacacttccacatcggtctcggcggataccccggcgccggcaacggacttctgcgcgacatgctcggcatccgctccgaagaattcaacatcctcggagaagaagccgaagacgaaccggccgaaatcggtttgtcgaatggactcacgacacgtctgtggcagaatgacgtgacctcggtcgctccagacactcgcgtgcttgccacgtacgtgggtacagccgctgctgactgggaactcgacggcgtccccgccatcaccagtcacccccacggccaaggcgccgccatctacgtgggctgcgatcttggccgccacgacatcacccacttgctcaaggaactcaacacaacagccccctccgacgaaagggctcccgaccaaaggccgggtgggggagagatcaacgccgcaactacgaccgcagcagccacgactcatgacccccgcatcctgcacaccatccgccaatcctcagacggcaccatccgcttcgacttctatctgaaccgttcgaagcagcccgttgccgtcaacggtgtggaaggtgatcccatcatcgcccaccgttgcgagactgacgccgttggatatacgctgaaccgcaacgccattcttatcgctaaaacgtcctgctaaaccgcgctagaatggcaatgttgtccggatagaggagtgtggcatgagcgacgagaaaacagccaagcgtcgagtgacgctacgcgatgtcgctcaggccgccggtgtatcgctcaaaactgcgtcgaacgtgatcaatggctccgggcgtatgaccgatgaaacccgtgcaaaggttgaaacagtcattaaggacctcggctaccgagtcaacgtggccgcccgcaacctcaaccgcgatcacaccggtttcatcacccttgccgtgccttcgctgattccgccatatttggccgagttggccaaccgcaccatcgaggccgcccgtcagcgcgactactccgtatacgtcaccacgtatgcagagggctcggccaaaggagcgcgtgacctgctcaagaacttcaactccaccgtgtcagacggcatgattctctccatgagcgaggtggaggatatttcgcccgaagacctgaaggtcgatttcccgctggttattgtcggtgcccgaaccacatggggtgttgccgaccacgtgactccggacgatgttgccgccgcagcaacagcggcaggctacctatacgatcgaggttcttctcgcctcgctgtagtgggcgcacgagacgactatgacgcggccgctttgttgcaggctgtggaaggcaacgcacaactgcgtttgcgtggtgtcattgaagaaacgcgccgccgtgggcttgagctggatcctcatctgattggcaacaccgatcaggattggaccatcggcgctggcgctcgcgtgactcagcgactgattgattccggcgtgccattcgacggtgtgatcgcactgaacgatcagttggccatcggcgcattgaccgctctgcgcaccgctggttatgaggtgcccgcgcaggtgcaggtcatcggcttcgacaacaacaaggaagccccctacctgcagattccgctgaccaccatggattcccgccttgactggacagctcccacggcagtgaatcgcatcctcggacgcatcgacggcagcatcaccaagcccgaactgctcaccaccgaatcccaagtcatcgcccgcgcctccacacgctgacatgtgcctctccgtgtacagtggcgtgtagtcgcagcaataaaggagcatcgcacatcatgaccaatggacacatcaaccccgccaacgtgccggacatcgccttgaaagacggccattccattccgcaagtcggtctcggcgtcctacgcatcgatgacgagggcgtggtccccgtcgtcgaatccgcgctggaagccggataccgccacatcgatggcgccgccggatacaacaacgaggccggcgtgggccgcgcgctcgccgcctccggctacaacaccggtgccaagcgtgagaccctgtgggtcaccaccaagctgcgcgactcccagcagggctacgattccgcgctcaaagctttcgacaactcgctggaactcctccagctcgattacgtggacatgtacatgatccattggcccacgccgttcgactggcgcagcaccgacacctggaaggcgttcgtcaagctgcgcgacgaaggcatggcccgcacgctcggcgtatgcaacttcatgcccgccgatctgaagcgtctgcacgaggagaccggcgcatggccggccgtcaatcagattgagctgcaccccacgtggcagcagcgcgaagtggtggcgttctgcaaagagcacggcatcgccgtggaggcatactcgccgatggcgcgtggcgccgacatcaacgccggcgacggcaccatcgagaagatcgccgccgcccatgaggtcagcccggcccaggtgattctgcgttggcacatcgaaaacggcacgatcatcatccccaagtccgtgcatgctgaccgtcagaaggagaatctcaacctgttcggcttcgccctgaccgccgacgaacacgctgccatcgacgccctcgacggccccacccgcgccggccacgaccccctcaccttcacctatgcgtgattgatggcacgtcgtaacgcccacttccgccgtcgtttcaacgcctctggaccgctggagcgcgtgctgattctcatcgttctcgccgtagcaatcggcgtgaccatcggcctgttactgccgcaggtcagctccgacgcggccaaaatcaccggtggctacactgccaccggttcagccgccgacactttgaacgcgctcgccgtagacgacaaccaaagctcctccggctacgaccgcgattccttcggtttccgcaccaccgacgtcgacggcaatggctgcgacgtacgcgacgacgtgctcgcccgtgatctcacggacatcacctacaaatacgccggttcctgtgtggtcgagtccggcacactggccgatccgtacaccgctcagaccatccattttgtacgtggccgcgccaccagcgccaaagtgcagatcgaccatgtggtggcccttgaaaacgcttggcaatccggtgcgcgcgactggtccactgccaaacgccatgaattcggcaatgacccctacaacctgctggccgtcgacggcccggccaatcaggagaaggggtcggcttccgccgcctactggctacccaccaacgccgactaccgttgcgactacgtggcccgccagattggcgtcaaagacaagtaccagctcaccgtcacctcccaagaaaaggacgccatgctcgccgtcctccacacctgcccaggccaggccgtgcccgcagaccagtaagaggaagggtatctcgcttgagagaggtacattaggccattcgcagagtgctatctgctttcaaagcagatagcactgtcagctgcactttcatgagcgagttttctgctgtctggcacatttcatgagcgagttttttgccgtctggcacatttcatgagcgagttttctagtaatttcctcatttcatgagcgagttttcggcggtttgtcacatttcatgagcgagatggcggggaatgccagctgccagtccgccagtcatccatcaatcgtccgcagattgtccgtctgttgacgtgagaaacatgcccgcgctataactgagcccggtatgaagggagaagggaataggaacagacgatatggcagtaacacacaccgcagcagatgccattgcggcaaccactatgacgaacgccgtggcagacatcgaacaggaaacaccggaaatcgagaaggaacgccagcttgccggagtcggagccggagctggaaccgtggcaaacggcaagaaaaagccgcatgaccatgcgctggccagcatcctcggccccgcgttcgtggcggccgtggcctacgtcgatcctggcaacgtggcggccaacatcacctccggcgcgcgatacggctacctgttggtgtgggtgctggtgctcgccaacgccatgagcgtgctcatccagtatcagtccgccaaactcggcatcgtgaccaacaaatccctgccggaactgctgggtgaacgtatgagcgatgccggccgcttcatgttctttatgcaggccgaggtcatcgccatcgccaccgatctggccgaggtgatcggcggtgccatcgccctgaacctgctgttcggattgccgctgttcatcggcggtctggtgatcggcgcaatctccacggtgatgctgtggttccaaggtggcaagacgcaaaccacgttcgagcgcatcatcatcgtgatgctgctgattatcacattcggcttcatcgcaggcctgttcgtggacccgccgagccccggcgaagtggtcaagggcatgattccacgcttccaaggcaccgactcggtgctgatggccgcctcgattctgggcgccaccgtgatgccgcacgccatctacctgcactccacgctggtcaacgaccattacgcaggcggcgaaaagccgtcgatcaaaacgcagctgaaaggctcgaaaatcgatgtggtctgggcgctgttgctggccggcaccgtgaatctggcgatgctggtgctcgccgccaactcgctgcatggcatgtctggcacggattccatcgacggcgcacagcgggcgatcacgcaggtgcttggcccggtgatcggcacgatcttctccatcggcctgctggcttcgtcgctgagctccacatcggttggcacgtacgccggctcggaaatcatgcacggtctgctgcacgttaacgctccgatgtgggcctgccgcgtggtcacgctggtgccggcactgattgtgctgtggttcgccaaggacccgactcaggcgctggtcatcggccaggtggtgctttccattggcatcccgttcgccgtgattccgctgatgcgatacacgcataacaaggaactcatgggcaagtgggctgatggaaccgtcaagcacgtgatttttatgattgtggtggcactgattgtggcgctcaacctgctgctgattgtcctgacgctgatgggcagggcgtaatagactccagctgaaatcctgcgatagcacaacataataagaagccccggttccagcaccggggcttcttattatgttgagaatggttgaatctgccgtcagttcgcagccatacgccgcgcacgccgttcgcgcagcgcgcgcaaggaaataatgtctcgcgtacgaccggcaccgtcgcccttgacgccgaagaacaccatcaacaccattgccagacagattattgcggagattcgcagcgcccattgaatgccgaaaatcgaagcggcgacggcggaggcgccgccctgcttatgcaaagcggcaaacgtttccatcagaatcaccaacacgggtgcgcccacagcgcccgcaatctgacgcgcggtattcgtcaccgatgatccggcggacacttcgctcggcccgttcaggcaattcagggaccacgtggtaatcggcatcagcaggaaacccatgccgatctgacggatgaactggcagatcgatacccaccagatccacgtatccatcgccaccagcgacatgcccaaggtaccaagggtcaacacaatcgaaccgaacaaagccacgggtcgtgcgccgaatcgatccatcgcacggccgccgaagaactgggagacgcactggccgatggcgcccggcagcatgatcagaccgctcatcgtggccgaatagccgcggtcagtctggatgtagagcggcatgatgaccaaaatcgaactgaaggcgaaaaatgccagcgacgcggtaatggtgccgacggtgaacgaacggttcttcagcacttccaagtccagcagcggcggctgggggagtgccgactcgtccttggctacggcctcgcgataccgcttgccagcgcgcaggttgcgcatcacaaaccacacgatgccgaccagtcccacaaccatcggcccccacgtgaccggtgccgcgaatccataggtctccgaattggtgaagccgaacataagcccgccaaagccgatcaccgacaggcatgccgagaagaagtccgcgcgggccgaagggtcgtgtgaaccgaaattatgcagtccgaacatggctgccagcagcgagattacgccaatgatggtcatggtcaggaagatcgagcgccagccattggcatcggtctgccagccgcccaaggtggggccgatggctggcgccacgctcatggccatgcccaccgtgcccatggcaaacccgcggcgagacagcgggtaaatggagaacacggtgatttgcagcaccggccacatcacgcctgtgccggcagcttcgagcacgcgcccgaccagcacccatacgaagtttggccccaaccatgccagcacggagccgagtgtgaacaccgccatcgagcagatgacgatctggcgggtggagaagcgtcgggtcagaaacgcggtcagcggcaccatcacgcccatgaccagctggaacacggaggtgagccactgcccggtggttacggagatgtggaattcggaaacgataatcggcagcgcggaactcagctgcaactgcgtgaagttgcccacgaaggtaataaaggtcaatatcgcgatggagatgaacgccgcccggctgagtttgccgtctacatatgattcctcgcggctcagcacccgctgcagttcgccgcgatgattcttgattccctgagctccgttcattccactcacgtgcatactccactctcgctgatcgaccgcaacaacgcatcaggcggtctctcaaagcaaccccaacacgctacacccaggggtagtccgtggggtagtccgtcgagatgcaatgccgagatgactggccgcccggttgcagagcaaatcagtcccgttattcgaggcgtcaaaatgaacgtagttactatccgatcacgttcgctatgtggttttctgccccctagcggttagggacgtgatgtctgtactatattgaaggggtaaccccgtatatacccgtacacgggggaatccagagaagtgagagccgcgagacctgcagtgtacggtcgaaaaggaaggactggtgtctgaggtgtcgtatctgagcagtaacggtcagccgtctacacgcagcagacaggccaatagcggtgaccggaccaccgctcagctcagagttatccgccaaaagcagctcagccacgtgctgtactggcgattcttcgtcaatctcgccctcatgcttatcgacgccgccatgtacatcatcgccggagctacggtgctcaatctgcgccatgaggcaacgccgctctattcgagcagattcaatttcacgattgactccaccgtttaccttattattgtggcctgcttctgggtgtggtcgctctatgttgccggcatttatcaccgccatgttatgggcgacggttaccagctcaatgtgctgctggtcaaaggcatggttgtgtgctgggtggtgcagtgcgcgttcagctacttcttcaatctgggtctgacccttacctcgctctgcttggtggtgattgccggatggttgctcaccatggtggaacgcattgccagccgtgcattcattacgcgtagtcgtcgcaagggcgcctacgcttacggcacggtgatcatcggttccccgcacggcattggtcgcacgctaaaattcctcggtcagcgtcggcaactcaactaccgcccggtggcagtatgcccgattcatctcaatcccgataccggattgattgaacagagcaccgaccatgagacactccgtgaggagatgcaaaagaacgagggctgccagctgcccgtactcgagtacagcgatcataatcttgctgaacagattattgacatgaacgcgcagaccgttatggtggctgacgagctgcatcgctattcggataattacgatatcttctccgtgcgcatggaatcgttcggtctggagattgccgtgctggcttccgccgctgacacttccaaccatgagattcaggttcgatccatacaggacaccacgattatcacgcaacgtcttgcgcagtacacgccagcccgccgtatggctaagcgcctgtttgacttggtgatttcttcgctagcgatcatctgttcgttgattatcaccatcccggtggcgatcgccatcaaagtcacggacggcggaccggtgttctacaagcagacccgtatgggcctgcgcggcaagtcgttccagatgtacaagttccgttcgatggtggtgaacgccgacgcgctcaagaaggagctcgcaaaagaaaccggccagaccgaccgcttcatcttcaagatgaagaacgacccacgcatcaccaaggtggggcatttcattcgccgcttctccattgacgagttgccgcagttcctcaacgtgtggatgggggatatgtccgtagtggggccgcgcccgccgctgcctgaggaatatgcccgttacaaccgtctgtacgccacccgcatgctggtcaagcccggcatcaccggtccgtggcaagtgtccggtcgctccgatttgtctgccgaagagagtgaggcccttgatgtggcttacgtgcagaactggtcgattatgggagacattgtgcttctcttccgcacggtcggtgccgtgctgagtcacaagggagcgtactgattcctttccgtttcgctgcttcagtcttgccgcgcccttgccgccccgcccttgaacgtgattccagaaagataagtcgatatatctatgactgattcgaacacaccagaaatacctcagccgccggcaccctccgagcggtcggaaaacgcggatgatcgccaagtgatacagccgtatgttgaccccgaggtacttgctgaagacgcccgagcggcggaacggcgtaagcaccgccggcgtatgagccatgaacatatcaggcggatcaagcgcaaaaagcgcattcggatggtgctgattgtaatcggcgcactgctgttgactattgccgcgctcgcggcgtggctcggcctttccgcgctcaaagcgaaaaatgaagtggaagcagcgattcaggccgcaagccgcatccaatcacaagttcaagccggcgacaccgacaaagcgcaagccagcattgaagcattctcccagcatatcgacgctacgtatgcgcagaccaagcagccggtatggaaactggccacattggtgccctattacggttctgacgtgaaggccgcgcgagacatggtgcacattttggaagacgtgtcgaacaacgcattgccgaagcttgccaaggcggcacaggccttggatttcaacagcatcggtatcaaagacggcacgattcagctgggggatatggccagcgtggctcaggatcttgccgccgccaatggagtagtggcggatgccagcgtagacatgggcaagattggcggtacgcatattccgcagattaccgaggcggtgcagcaggggcgtagcaagttcaaggagcttgccagcctgacggatgcggccagtcggctggcggatgtgctgcccaagatgtttgacctggatgccagcgatggaggtggtagcggcagcggcccgcgaacctacctggtgctggcacagaacaatgctgagctgcgtgccacgggaggcattccaactgcgtgggccacgctcaccgtcgatacaggcaaaatcagcatgagcacgttcggcgatccgcctcagaatggtctgttcagccaggatgaagccgcgagcgtactgacggcggaagaacgcaatcttttctccaccaagatggccacggactacccggacatcaatttcactcccgatttcccccgcgtcgctgatatcgcgagtcagatctggcatcgagccggtcatgacgatgtggatggcgtcatcagcgtggacccagtgttcctgcagcggttattgaaggttgccggccccgtgacgctctccgacggcacggtgatgagcggcgacaataccgagcagcgaattctgaaccagatttatattgataccgatacgcaggcggagcaaaccgacttctttacgatggcggccagtgaggtcttcgctcatgtgctcaagaatgtgggcggcaagaatcagcagctggtgcagacgttccaggagtccgtatccgacggccatctgtatgtatggagtgttcatgaggatgagcagcggcgtatctcgggtacgaccatcgccggcgaattgcagtcgaaaccggctcattcggttacgggcgtgtacttcaacgatgccactatgggcaagatggactggtacctgaagcgtgaagtgaccagtacgtatgacaaaacctatcccagtggcgccaagcaatacaccgttcacatcaaattgacgaatacggccgatgccgccaaggtgaatgccgctccggatctgttgcgcggctatgaccataacggcaacccccgtacaggggagatcgaaacggtgctgtatgtctacgcccccaatgaagggcgcattgtggattggacccaggatttcgatcagttcgctgtgcacgatggactgacggtgggtgtgaaaaccgtgacattgcggccgggggaaagtttcgagaccacggtgcatgtgctggccagtcccgcggccaatgaaaatgaaatgattttgagacagacccccttggttgattaaaggggcaacccctatacattaaggtggaaccgtgaataaggaagaacggagcatagccgtggatgaagctgaacaggtgcaggatggtaatggagtcaccattctcgatttattcaatgcggtaagaaagcatgtgattaccgcagtagtcacactggttattgtgatggtggcaatctgcgcgtacacctttacccgcactccgcaatacaccgcaatttccgaactcttggccacttatcgcagttcagcggctgcgtcgggcgcatccagcaatgcaggcgagctgagctctggcgccaattacatcaatagccagattcaaacgtatccgcaattggtaaaaaccgagtctgtattgcagccggttattgacgatctgggtcttgacaccacggtaaaggaattggctgcgagcgttaccgcttccaacccggatggcaccatgctggtggatatttcggttaataatccagacccgaagcaggcgtccagcattgccaattcggttgccgaaaacctgagaaaacaggttacttccacgatttacagcgatgagggcgataagatcatctctcccgtcaacctgactgtggtgcagcaggcgtacgctccggcttcccccagctcacccaacgtcaagctcaatctggcggcaggtcttgcggttggtgtcattctcggcatcgtggttgcctttatcaaggatttgctggacacccgtgttcgccgcgattcggatgttactgctgttatcgatgctcccgtactggggtcgctgagccgcaatgaggcttatgccggtacgtcgccggtgattatctcccgcccggcctcccgcgaggcagaagagattcgacgcctgcgcaccaatgtgatgttcgtgctgcccgatgagccgttatccaatgtaattgtggtgacttccaccggcccgtccgaaggcaagaccacgctgagcgtgaacctggcgactgcatttgccgaaaatggcagcaaggtactgctgatcgacgccgatgtgcgcaacccctcggtgagcaaggccctaggcattgagggcgcagtgggcttgacccatctgattaccaaccgtgtatcgtcgcatgatgcgattcaacgctactggaagccgaacttccacgtgcttcctgctggaaaacaaaccatgaaccccagcattctgctgaattcccgcgctatgaaggcactggttgagcaggtttccggagcctatgactatgtgattatcgataccgcccccatgcaggtggccaatgatgccgccgtattcgccaaggaagggccggaactgctgctggtggccggcttgggagtgacggaaaagaaactgctccggcagaccgggcgcgaactgggcacactgagcatcgatcccgtgggcttggccatgaattacggcgagacggagaagccccagaagggtggctattactactacggtgacgagtccgacgacaacggcaggaagcgccaaatccagcacaaaaagagcgagaaaatgaagaaggactgaggccatgaggatcgcgttcatcggccacaaacgcattccgtctcgcgaaggtggcatcgagattgttgtggacgaactggctacacgtatggctgcacgcggggagcaggtcatagcgtttaaccgcaaaggccataatgttgccggtgcggtgttcgataatgcgtcgaaccagaatagcaagccgttcatgtatcgcggagtgaaggtaatacctgtcaccactatcgatgcaaaaggtctggccgcgctcacctcgtcattctttgccacagtaaaggctattatggcccgccctgatgtgattcattaccacgcggaagggccgtgcgtgccgttgcgttttgcgcactggttcggtattcgtacagtggccacgattcatggtctagattggcagcgcgccaaatggggtaaattcgcctctacgtatctgaaattaggggagcgtaccgccgctacctgtgccgatgaagtgattgtgctgagccgcaacgtgcagcgctatttcaaagacacctatgggcgtgatgtgcgattcatccccaatggcattgaacgcaatgagtctgttccagccgatgagattactcggaaatacggtttggtgaaagacgggtatgtgctgtttctaggccgtatcgtgccggaaaaaggcgtgcattatcttatcgaggcattcaagcaattggatactgataagaagctggtcatcgccggtggatcttccgattccgctgaatactatgaacagattcaatctgctgcggctaccgatcctcgcatcgtgttgactggttttatcgagggccaggaacttgcggagttgtacagcaatgcttatatctatgtgttgcctagtgatctcgaaggcatgcccatgagtctactggaagccatgagctatggcaattgttgccttacttccgacatccccgaatgcgccgaggtagtagaagactacgccgttactttccataaaagcgacattgcagatctcactgccaaactgagcaacttactcgccgattcctctcgtgtggcggagctgcaagcgaccgccgccaactacatcacccaaaaatacaattgggacaaagtagtggatcaaaccttagccttgtataaggccacagaataggtatagggcaattgagtgagaggtaattgtgcaatggatgttcaacccttaattagcatagtcgtgcctgtatataatgtgaagcaattcctgacgaaatgcttaaatagtatcattagccagacttattccaatctagaaatcattgtcgtagatgatggttcaacagatggttcggctacgatttgtgatgattatgctaaaaaggataatcgtatttcagtcattcacaaagaaaacggaggcttagcctctgctcgaaatgcgggaattgacgttgctaaaggtacatatatagggtttgttgatagtgacgactatatcgagccatatatgtatgagaagcttcttcaagcgatcttgaagtattcttgtaatattgcggtatgcggcatcaactatgtatttgatgatggagaagttatcgccaaggccaataccgagccagagcagttttttgagtttcctcgggctattgaggagatgaatacctttagactatttgatatgggagcgtggagtaagctttataaaagagaattatttgctgatattcgcttccctgtcggtaaattaagtgaagatttcttcattatgtatcgactgtttgaccttgctcagggagtcgcctacgttcccgatgcatgctacaattattttcagcgtgccaacagcattaccaaaagcaagaagattaatcatgattttcttgatgctgcctatgagcagatggtctttctggataagaattatcctaatctggctgttattggccatgtatcatatgcatcagctgcattgactgtttacgattcctacttgaagaataaggtgcaatgtcccggatccttccggaatcattgccgagaaattattctggataataggtcctatatccgtaatgccagttatctttcgcgatccaagaagatccagtttagattgtttacgttaaatgctcttctttatgataaggtcttccttctttataggaagaagaagagggtttgattttgctcatagaaaggggtagaaagaggtgatcttatgaagaagcttctatacacgcgcattacagaaaaaacaatcgcgctctttctctttgcttttttgctattgagccgtgcgtctattacgacaacggtgaatttcattcctcttaatacaaccgttgttcaggttgcctattccggatgtatgtttatgttgtatgcatttgagaagatcaagaggaatgaaaagtttggcacatttcatatatcaacgtttctttcgattcttcttgctgtctatatagttgtatttggcaaggtttttattaatcctcctctggcgcaatatacaaatggtatttttatgcgtcagacactattccttttggtagtgttttctacggtagctgtgatatgtgtctatcatctttttgatggggtgctactgacagcgtattatgttttttcctttatcattcttttccagtttctcaccaatataacagatatagcacagttgaatgtggctactgttttcaatgattctgaacgggctcgagtgacatatggatttagtcattacaatgctttaggtgcattttgcatatgttatttgatgatttggataattctgcgaaaaagagaccgaatgccctttggcaataagtggattaattatctgaccttgcttgtaagtgtcataatgctgtttggcagcgcttcaagaaatgcgatttcgggatttattattttttccctttgttatcttttcatgatgcttagggaaagtaaaataggtcaaagggttcgattttttgttgaatgtgcaatagcaattattgtcgttctattcttttcgtatggattaaccgggttatcattctctgatttattaaatcaatccaatcgagaaacactgcttgaagttgctctccccacctttttgaaaagtgggcgtatggttgttggtttgggattggcctcgaatgaaatttatggtttaaatcaaactccgtataagacgtattggttggataatagttatgtctacgtgttaatcacatcagggtatcttggttgtgtattttatgttactatgattattatacttttcgtcggattgaacagggtggccaaccatgctctgagaaaggttttcttaagtttggccatcatgtatatgtattctgcgatgttcgagacaacattgttctgggccggtgttatgcagaattacatatatatgatcatattccttgtggcgctgagcggtttttttaataacccaagttttgataaaaatattcaatatatctcaagtaataatgtaaagagataaggagaaatagtaatgacttcgaatggcaagatcggcatgatgacttttcatgcttcacacaataatggttctatgcttcaggctcttgctctgcagcatgtgctggaggatcgttttcatcaacaaaccgagttgattgatttttccaaccgtgggcagcgcaacatgtatgctcccatccctaagcccaggaattggaagcaggcgattaaaggtcttatctgggctacgaatatgaaggaaatgaagcgtcaatacaaagcatatgaagactttcagaagaagtacttccacctttctaatcgctcatattcggattccagcgagcttgttcctctttcggacaagtataaggcgttcattactggtagtgaccaggtatggaacattaagtgtatcgatgctgatgatgcatactacctctcctttgtgaaggatcgtcctcgctttgcttatgcagtaagctttggtgccaataatccattcgatttggagggtgattctactcgttatgaggattactttgccaaatttgacaaggtttccgtgcgtgagaaaaacgctcagaagtggattaaagctgccacgggtgttgaggtgcccatctgtcttgatcccactatgctgattgatgtcgatgaatgggaaaatctcgttgatatcggtaatggtcctgtgatttcgggagattatatcttctactattgcttcagcatcactgaggaggtccagaagtttctcaagtcggtttccaagcggactggaatgcctgtgtacttcatggaggccaaggagtggacattgaagatgtgctggcgcaacggaatccgtttgattaaatcctatggtcccgatgtgtacatgaacatggttaagcacgcgaagctgttcatcaccagctccttccatggtacggctttcggtaccttgtaccggaagaatttctggtatatcaggagcaagcatagcgagacgtctcttgatgatcgtgcgagctccttcctgacccagcttggcttgatgtcgcggtatcgtacgatttctgaattgtcgaagattgacctgtttgccccggctgactattccactttgccggagaagcttgagcctctgcgtaagctttcgtttgactatcttcagtccgtcgtggattccctggaataatgtcacgtcacgcttatcttattatggctcataaccattttgagcagttacgagccttactccgatgcttagatgacggtcggaatgtcatctatttgcatcttgatgcaaagctcggcgcggttgatgttggtcaatttaaagatcaactgaagcatgctgagctttgtgtgctctcaaatcgtgtggatgtacgctggggagatttttctcagattgaatgtgagcttcgcttgttggaagcatctatacccggccattatgattattatcatctgatgtctggtgcagatcttcctttacagtctcaggatgtcatacatacctattttgaaagatatcaggggacagagtttgtacattttgatgcgaagagcgtggatcccgaaacctacgagcgtgtttcaaagtatgcatttttctcaagtagagaaaagaacatatttgaaaaagtgatgtacaggttaacgatgcttgctcagttctggattgatagaggacgtctttatggcattcaatatcaaaagggtgccaactggtttagtattaccgatgactgcgctcgttatatagtttcgcgacgtaagagagttgaacgagtattccatagaactcgatgtggtgatgagttttttatacaaacaataattgtaaattctgggtttgaaaaaaagctatatcgcccaaatttcaatgatagttacaagacgattcgatattgtattgattggaaacgcggcaacccatatgtgtttcgtaaagaagactatacgatgctcaaagcaagtggaatgttgtttgcacgtaagtttgacgaagatatagattcggaaatcattaaaatgattgagcggtcaattaccaataacgagtgaacataatataaagaggctgtatgacttcgttgaaaaagaatatggcatataacgttgcctaccaggtgttagtaatcgttttgccattggtgacggccccatatgtttcccgaattttgggtgccgaaggattaggaatttattcctatattttctcaattgtaacctacttcggattgttcggcatgctcggaatcgccaatcacggcaacaggagtatcgcccttaccaaagctgatcgagaaaaggtttcccagacctttatcaatatatatgtgatacagctttttaccacgttcgtggcgttgattgcttacctattgtttgtaactttcttgttttctgggaataaaatagttgcttatattcaaacgataattttattgtcatatgtcttggatataacctggtgtttttttggtttggaacagttcgctgtgaccgttactagaaatgcgatcattaaaattgtaacggtaatagctatatttacgttggtgaaacatcgagacgatgtatggatctacgcgtttattatgtcttttggtatgttgttcagccaactatatctatggttccaacttcataagtttgttagtttcaaaaaaccacaatgggccaatattaaaaggaatatccaaccgattttattattattcgttcccgctattgcctatagcatatataagctgttggataaggttatgctgggcgcaatgacttcgatggcacaagtgggaatgttcgataatgctgaaaaaatcatcaatattcccaccagcctgataactgcattcggtacagttatgatgcctagaataactacactattggcaagtagcgatagcgaaaagatttcttatcttaacagaatttcagttcgatactttactatattggtggttggagctgctttcggtcttgctggaattagcagtgtgttggctcctgtttattttggtcaagaatttgcagatagttctgtattgattgctggacttggattcagcttgatttttgtcacatgggcaaatgtaataagaacgcagtatcttatccctcagcagctggatcgtccatatgttatttcaaccttaattggagcagtagcaaatcttgcagtcaacttggtcctaataccaagatttgccgctgtgggtgcaatgattggtaccattgctgccgaattcacggtattctttgcccaattattgtttgttcgtcggcagtttcccatgatgcggtacatcgttccgacattatggcttttccctataggtgctgtaatgtgtttcgctgtttttgagatcggacatgttatgggaacaaccattacctctttggtagtacagcttcttgttggtggggttatttatcttactggatcagcactgtatctatggcttgttcgtgatgaatttttgatgagaatgctaactagacttggttggaaaaccgtatcaggacgtcactcccagaagttcaactaggataggtgatagtgaatgaacgaatcgtcgatattgtttagtgttgtaattcctgtttataattctgaggattatattgagcaacttttaagacattttgttactcaaaacaataatcgttttgaagtaattgtagtggatgatggatcaaaagataactctctttcgatttgccaaaaagtttctgagcagaacgatttcattgttgttctatctcagcggaatcagggtgctagcgcagcccgtaattatggacttcggaatgtgcggggaaagtatgtcgttttcgttgatagtgatgattccattaccgatgattacgtgtctgcactgacacaaatctgtgagaccaataattctgatcttatccagctgaattggctgcagggatcatcggaggagggttataagcctgcatataccgatttgatggattgcaacccttccgtgaaggggtattgctgtgagctcttacagcagaaatttaatccgccgtggaataaggtgtataagcgctctttgattgattgttacggcattatgttcaatactaatatggtaatgggtgaggatcttgaatttacgattaaatatgtaaataacattcaatccgtgtcgattaattcccggtatttgtataagtacttcctgaataacgatggcttgtgtgcaagagcatctttgtcatatttttcggatcttcgcaaaatctatgatgctatgcagaagcttgtttttaatcgatcttttggccgtgcagtgttattatatgctgatgagtcaattgttgcttcagttttccgctcgatcggaagttgtatgcaaagcggcttttctccaaaggagatcaagagagaagttaagaagactggtttcatcgatttattcggatcgataaaaaatctttcgattccgtctcttttgaggaaagatttggttcttttggggttttacaatattattgctttgctatttaaacttaagaacggctctaatggtcgcgtttaattatttctatattaagaaggctcacatggcatatgaatataagcgaattaaaaccaaggatgatctcaaagagtttattgccgctgaccgccaagctcagcctacgcaatggggggggggtatttgatctaatctttaaattgaagacactcttaagaaggtgtgagtatcataggaataataaaagtaatatttatcattttttaatgtttgtaattttgcgatacagatttcgtaggttgcagcgtaaaatgtgctccgaaattggttttaacgtatttggaaaaggcttgatcatttggcatggtcaaaggataattacaaatggtgaggctagggtgggtgactattgcagtatctccagcggtgttgtaattggacatggaaatggtggtgctcctcatattgggaataatgtcgaaatgacgattaattcaacaatcattggagacgtatccattgctgacaacgtcaggattggtgccaacgcattagttgtgaaggatattattgagcccaatacgacatggggtggtgtgccggctaagaaaatcagtgaccatggaacagtagaaaatcccgtcgtcgcctaagcctcttgcaaaaactccctgctggtttgagaactttggctattcgctgtttgtggtgggtgatggtcaggtggtggtgacggctttgaggtcgagtttgccgcaggtcaggtagatcatggtggcgaagtagtctatgttcctgaagcctcgtgcccgtcgtttgacgttctggatgacgttgtcggcgcccttgagcacggcgttggtgtacgggtgctcgaagtaggcgacgatcttggcctcgaagtcccgggtgaacctcgacccgggctcggcccacggtacctgcgcgaccatgattccgcgcctcgggcagtccacgcgcgtcatggcggcgaccagttcgacgcgccagcagccgaaatcctggccacgccaacggcgcgcgccgccgccttggtcgtaaccgtgccagcgttcgccgcatcgggagcatctgagcatgcccgcacgtgggcgcacgcggatctcgagcacgggttcgggacgcaatggggagtcggcgatgcgcgcgtcctcgaccaccgtgcctttgacgttgagaagctggttgaatatcctgctcatcaggcgttttttggctgtgtttttcttggtcgttaaacatcctacctaagaagcgctcttctcttactcccgcaacggttcaacaacgaaccaccacccacgaaaacagcaatagcgccataaatatacacttatatacacatatatacacatatatacatgaatatatgagttcaagcgaactgatgctacgccggctcgttcccgttcccatcaaacttgtgctcatcctcgtaggcaacgatgtccatatcgcctcgatggagtttcttgagtgtttcagctactcgcgcctgctcatcatcaacaacagggcgctcgccggctaagcatgtgagaccatcggacactgcggaaaaacactgccgaacccgcccaacaaacattgaagcaatacttttttatttgcttcgttactgcgtattctgtactccacatgtgcgaaacgttggaattccgccattgtgcgaaacctatccgccgttctgtgagcaccccctcggcgcgtcgtcgtatccggcgcgttcctacgagcagagccaatccatgacgttggtgatatggatgccttcgtcggtcatgccctcgctatgccagtcgagggtgagcaccgtgcgggggaatgcgtcacccaatcgccgcagcggggctaattcccgctcccgggtctgctcctcggtcatgttcaacgtgacctgaatgtactgcttgtcgtttccgcgcttcgcgatgaaatcgatttcgccgtcgggcagtgatccgatggtgacatcgtaaccgcgtcgctgcagttccatgaagacgatgccttcgagctgggctccgcgatccgagccgttgaaacccgtggcgagattgcgaaaaccgttgtcgacggggtagaacttgcgttgcgggcgcagcagttccttgcctcgcatgcgttcctgttgcgcgctgtagacgatgaacgagcgttcgagcgcgctgatctggttgtcgacggtggcgtaggaggcgttcgcgccggcgcttgcgagcgtgttggcgacattgttgacggagaacaggtttcccgacgtcgagaacagatatcggctgagtttttccaatgtggcgatgtcgcggatgccgtaccttcccgccacgtccttcatcacaatggattcgtagattgaggtgagtatttcggtcgccttgccctgatccggctggccggtggcgaacaggccgggcatgccgccgaacatcatgtatttggagaacagccggtccgtggaatccgtggttccctgagcccgatgatggcgttggtattcgtcgaaggagagcggatatacggggatggtgatgtagcgacccgtcagatgggtcgccagttcgccggatagcagtcgtgcgttcgatccggtgatatacacgtcggtgtcgtcacgggaatgcagccggcgaaccacttcctcccatccgggaacgtcctgtatttcatcgaggaaaacgtagaaggggccgggttgggcttcttgcgtggcttgcatcaggtcggcgtgcaggtcggtcgccgaatatccgatgggcgtgtcgaaggaatcgaagcgacgggtgaagatattgctcgcgggaacgccgtcgtcgaacagtgattgcgcataatgttccagcagcgtgctttttccgcaccgtcggacgccggtaagcaccttgatttccggggtgttccggtggctgcgcagcgtattggtgagcttgtctcgtgcgatataccccgtcatctccacgcctccaatttttggtgtattgcaaaacagtcgttaaatcgacgttgattttcagtatacttgaaattgtgcattttggagtaatgattttatagtgtactcaaaatcgtgtggggcctttcgctgtttgtggtgggtggtttggttgtggggtgatgccggtcgggtaggttggaagcatggatacgtcgcatttgtcctccaccgcgttgcagcttcagtctccttggaaagtggggtccgtggacttccgtgacgccgacggcggccgtcaggcgtgggccgtggagatggcccgccacctgaccatcacccaccacaaacagcgaatgtgttttttatttgcttcgttactgcgtattctgcactccacatgtgcgaaacgttggaattccgccaaaattttatttgcctggtatttgcttgggtgggtcgcaaagcgcggttgcggcacgattcttagtggtggtgccttatggcgtcgggctttccttgcaaatcgaggtaaggaaactggcccttaacccggaatttgaaaaagtaaaaggtccctggctgttcaccagccagagacctttttggtaacaactgaggttgaggaaacctcggcagttgggtccaacggggcgaaagtctgtggcgccgccgagaagattgccccgaagctagcgcgacctttctgctacaacacagcataccagcatccatcgaaccttccccgtacactggacagaccaaaccaaggaactactagcgtggcaccttggcacggtgtcattgtgccagcaggcatagtgactggttacaactaaagaggaggttctcatggaaggcaacgaccatgacaaccgtccgagatctgaccgacaataccgggaaggcctgatgacgggcctgttgatcgctctggccaaccaagttggacagggatggtcgacggctatcatcatcgccacactggtactgcttggattaagtctcagacgaggccgctgacttgtcagcggaacagccggaatcttttacgggttccggcccctcgtcttcaatcagggcactatttcaaggcagaagaatcaggcggccttcttgcgaccgcggcgcttcatggtgccggcggtggcattggccacgtcgaagatcacggtcttgctttcggggtaggcggtaccgttgacggactggtaggcgatttcgccttccggagcctcgggcagagtgaagtatgccttcactgcttcaatgagcgtggcttccttgacgcttaccgaagcagcctgcttgccttcgggcttgctgaacttaatggcgttgtcggccttggcggtggtcggggttacggcgatctgcttggtcttgtcgttaatcagcaccttgacgtacgccgggaatccgagcacttcagcggtggctttgttgaaacgaatggcggaatcggtaacggtcagaacggtcttgcccaccggcttgaccagctgaacctcttcgaatccctgaagcaatgaagccataattgctctccttattgcattggtcacgtgtttttatttacgtcactaattgtaaccagctaatttcgcattatacaaatcatatgcatgcatgattgcataattgaagaacatttgacctacgtattgcgctccctgaatagtaccgatttaaccaataccaagaaaagcggaaacaagaacccgcaatatcagccgtattgaatatagcaatatgcaatttcaacatcgcaataactgacggcttttttgctggctctattcgccgatattgcattcaggccacagcactgagcataatatcgacgccgtgcttgatttccgcatacacgcgttcaaacacctcgcgtgattgacgatgagggtcttcggtttcgagtgccgtaggcaaaaacggccgcagcatagatacgcaatccatgatttcgatgagcctgtctgcggtggtatcgccggcaatcggaccctcagcatgcatatgtttgcaagcgttcacgaagtcattgaacagaaatactttgcgaatagccagtggattctgctcaagcaaatcggatatttgctcacgctcaaaacacagaatcaggtcggcttgccggctgatatcggtggtgagaggggtggaagaatgggaattcgcgtcaatgccgtcgttcttcagcaaatcgataaccatcggatcggcgggatgcgggggatagtgcagagtacccgcgctgcgcacggtgatattgtcgttctgcaagccaattcctcggtcggcaagcttggctcgggtgtagtattcggccatcacggaacggcattgattgccggtgcatacatacatgatttgcataacaacgtcccttctcaagtgttgtgagcattccctcatatattccagtgagcattcctcgcgaatatgcgtgcgttatgtaccgtagcaataacatgaaaaaaccgggaatcatcgactcccggttcagtggtattcgcgaactatgcttcagcgtctactgtttattatgtcagtcacgtcagcgacgagtggtgttcttgcggacggcgaacagggcgatgcccgcggcggcaagcagaacaacggccacaccgtacggtgcgatggccgcaccggtgttggcggtggtagcagtcgtggtaccggactggtcaccggttccggttgccggaacctgaatggtggcggtcttggtaccggatacagcgccaacagccttgaccgcgatggtcttgccagcctggctggccttgaacgtgtacagcaaagtcaaggaaccatctgccttggcagtgaacgtcttggatacttcagcgatctgctggacgtcggcgacgatggcatcatcgtagtacacggtgacggattcgttcggctggaatgtgcctgcagggaacgtcacggtagcggtggtgccgccgtaagtaaccgttgcaccgtaatcatcagccatagcggtattcgttgcaaaaccaaagcccagaactgcggcaatagtggccagcacggccataatcttcttcttcataacttcgaacctccacaatagaaccggttactaggtagtgcccgaaggtttgcgcacttagggtcgtgcccgtccatgggacgatgatcagttcgcttcctgcaggttgtcatcgagccgggacatgtcgaggtagcggcgcgtgctccattcgttcgcggtgacgtacctgattctggcgcagatgagcatcaacgcgctgttgccgtccgggaaactgccgacgacgcgcgtgcgacgccggatctcccggttcagccgttcgatcatgttgttcgtgcggatcctcctgcggtgctccgtcgggaattccggcaaaaggtaggcggtcgtctccccgatgccctcgcgcaggcagccggccgccgccttgagcttcctggactccatctccgcggcgaccgtcccggccttggcgagggcggattcgcgggactccatggcgaatatcgccttcagggccgcggacgcccaatcccggtggttgggcggcaccttcgagagcacgttgcgcatgaagtgcaccatgcaccgctggtacttcgcccggggaagcatcgagttcaccgtggagacgagtcccgcgcaccggtcgccgaccacgaggcgcacgcccttcaaaccgcgttcgatcatgcttcgtatgaactgctcccagctggcagcgtcctccctcatgccctccgtcacgccgatgacctcgcggtggccctccgcgttgacgccgatggcgacgaggacgctgacgttctccacgcttccgccccaggagcgcttgtgccacacgccgtccatgaacacgtacgggtattcggattccaatggccgggtgcgccatcggtcgatgtcgtcatacacgcgcttgagcttgtcggaaagggtctgggatggcatcctgtcaccccacagcagtttgctgatgtcgtcgacctgacgggtgctcactcccgccaggtacatctccatcaacgcctcctcgacgctggactcccgcctgcggtagcgttcgatgaccgcggattcgaagaccgcgcccttgagtttcggcaccctgagctcgagcctgcccgcctttgccgtgagcgtgcgttcgtagtggccggccctgtacgccttgcgcccctccttgcgttcgtatctggcggccccggtgatctcgtcggcctcggcgtcgagcatggcgttgaggatctgggtcatcttctcggtgaccagccggtcgagtttggtctcgaacaggttctggtcgatctgtatgatgttgctgtcgggcatggctgcgcgtcctgctttccaattgcgattctttgtttggcgactgaaaatcgtacacaggacgcgggccatgcccgcttcaacatctcaacgaagaacaaaaccgaaagtgcgcaggaattcggacgttatcggttactaccgataaaaaatcggttcttatcaatagaaaatcggtcttccttcaattacaacccccaaccatacacccccctttgtcggtatataaggggtaattatgttaacgggtaagggggtgtgacaacgtggtcacaccatgtgacaacgttcgaacatattgtcgccgcattaccgttgcagcggggtcttctgacattctgaaaacgttgttattccaacgattgcgctgattggcgatacgtgcatggcaaacaacagggaaattttttctgcgacacgccgacgggctactcggattctgatttgtactcgtcgtcaaaactgaacaggtcctctacggtggtgccgaacacccgcgccaaatccatggccagacgcaatgacgggcagtattgcccctgttccagccttcctatggtctcacgtcgcacgttgaccagatcggcgaggtcggattgcttcataccgcgttggagtcggtgaagtttcaggctagtcttcatcgtcgccctcggtgccggcatcgtgttccagccatagatatcgaatatcggaaatggccagggcgcacatggccaatgcgggcaacagcattggcggaataatgtgaactatcgagcggtcaatcagattcagtgtggtgtagataaagccgacaattaccagaatgcccaccaaactgaccagcgcgaattgcatggccgagccttgatgcatatcggaaagctcgtcgcgtcgcgggtgctgccgtcggaatgcagtcatgccccatacttcgccgccgatccacaacagcgccgcgatcgctgccacgattactccgagcaggttattgccaataagagccatcagcatgcaggcaatggcacctatggattcaaggatggcacaaaagcagatataccgattaaaagtcatggccgcctccgtgaattatgcgagcgatattgaattgcatacgcaattataaagttagggggtaaccccttgtgtggtggttagaccaaccggcggaggctctttgcgtagaccgagaataatcgcaatcagtaattgttatgagcgatccagtagttgtacgctgcgacgatgccgccgtagcgctgctcgcaatagctgatgaaccacttgaactgggtcttgtagttggtctgccagtccgcaccggcggaagccatcttgctaccggggtaggcctgacccaagccataagcaccagacgtggggttggtggcggtggggctccaaccggactcgtggttgatgatgtagttcgcagcggtgaagtccgcttcgctatacccgttgtccaacagatactgatgcgcccaggactgcacttctccagccggaacagtggtgccgagatcggctgacgacgatgacgacgtcgacggcgacttggtggaaccagtgcccaccaggatcaccttatccaccggggccttcttgacccatgaggcgaatacgttggaagagacgaccttgtcgccggctcgcttgaccagcgaggtggtctccataatgcccttctggccttcggtctcgaccttttcctgacccttgggcaggctgctggtctccttgcgcacttcattgaaggcgatctcggtatcgttggtctccacatcggcatccgcgcgattaatggtgaccacggtggcctcggtgaccttggatttcagcgagggagatacggcatcatccgggtcaagcgtgatatcacccgtctccagcacgtccttgacggtggtcatgttggctttttcgccaagtactacgcgcgaatcgccattaatcttcaccgtaacgaacgtggtgttcttgtcggcgctgttgattgcgccacgagtggcagaacgggatgcggccgaatcggtggcggagaacgaagtgatggtggaaatcggcttcacatcatcagcatggtagaaactgcgcgacaccaatcccgccgcgccgagcagacctgccgcggccaccacagccgcgatcttcatccactggcgcttgttcaacggtctgagcatacgggtcggcttggcatgtctcgtcattgcgctccttgatcggatttcacactgcccaccatgataggcggcgcagtggatgaaggaaaatcaggctcaggcctgctggtcggcaccggactgggcggccttggcggcggccagatcgagtgccttggcctgggcgatcagatcgtcgagatcggcggcctgcagcgcgccggcctgctggaagatgacctcgccctgcttggcgatcatcagcgtgggcaccgcctggatgccggcggcctgggccagatcctggttggcgtcgatatcaaccttgacgaaggcgatgttcgcgttctccggctcgttggaggccgcctcgaaaatcgggccgaacgcgcggcacgggccgcaccaggtggcccagaagtcaacgaacacgatttcgttgtcggtgatggtcttctcgaaatcggcggaggtgatggcggtggttgccatgatgttcccttcttttgtgttttccttggcatcgccgtacggccctcatgcgtggccgccgggcgattgccttattcatgcaatacgtcttggcgcttggggccgtgcggttcgtggccgtcggctccctgctggctaccagcttcccagcaccacccaacatttgtgtcgtattttccgccgccggccaaacgtttcccaagatttcgccgtaaggtgacgcgtggcgtgattttgcgcgcaataatgggatgcatgccagtcatgaatgatgaagtgcccgacgagggcgattatgatgccggccgtggccgcggcgaattcgacaacatcacgcccgaggacttcatccgcgggggcggttccggtcacggcaacccgccgggctggctggggccgtccgacatcaaccgggcgcgccatcagatgcccatcgcgtatgtggagatcgtgcccgtacgcaccgatgagatgggccgcatctcccaggtgggctcgctgctgcgcgtatccgaggacgggtcgatcgagcgtacgctgatcaccggccgtgtgctgtaccacgagacgttgcgcgaggccatcgcccgcaatgtggccaaggacctgggcgatatcgccttgccgctgctgccgatcgggctccagccgttcaccgtggccgaattcttccccacgccgggactaagcgaatactacgatccgcgccagcacgccatcgcactgtgctacgtggtgcctatcgccggcgactgcaagccgcaggatgagacgctggatgtggaatgggtggatcccaagagcgacgtaatggacacgttcgtggcgcagatggtcaacggccatgggcgcatcgtgcgacaggcgttggcctgggccggaatctgacagttgttttgccttccgttggaggggatggcgcgtagcgacggagggcggtccgcgttgagaccgctcccagccgactgtgccgacagctccgccagtggggcgcgaatgtgaaggagtaattcatggcaatcgaattggccaatcatatctaccgcgacggcgaaggcgtgccggtggtgctgatgaacgcctacccggtggaccaccgcatgtgggacgtgtgcgcgaaggcgctcgccgacttcgccgacctgaacgacgtgccggacttcccgatctgggctccggacatggccggctccggcgcatccccggtgccgagcgacgccgattcgggcccccgcatggcgaacggcgcgtacagcgaggcgttggatcgcctggccggagcctacgtggacctgatcaaggccgccggctatgagcaggcgatttgggtcgggctgtcgatgggcggctacgtggcgatggacatccagcgcctgtaccccgaaacggtggccggactggccttgtgcgacacgatggccgcgtccgacggtgtgggcggagagaaccgactgaagatggcggacgccgtcgaacagacgaactcggtcgaaccggtgatgcacttcgcgcagccggccgatggcgattccaccgtcaagaagactcctgaattcatcgcgaccatgaccggctggatcaacgaacagaacccggctggtctggcctggcgccagcgcatgacctacggacggcctgaactgggggcggtgccggaaacgatcagcgcaccgagcctggtggtatccggcgaactggacccctccagcaatccgagtgtgatgcggccgctcgccgaacgaatcaccggcgctgaattcatagatattccggactgcggccatttcagtgccgtcgaacatccggataccgtggcgcgagcactgctctcgctcgtcaagcgcgtgcagagcgcgcagaagaacgcataggagacttcgatgaccgctgacattcatttctcgcctctggcactgacccatgcgctgccgttcctgccgctcgcacaaggtgacatcgactatcaggtggaccggcgcagcgaacccggcctgatcgacgagctgttggccgagccgaccaccaaagtcgtgcttacgcgcggcggacttgtcgccgtaccgcgcggccaaggcgagcttgtggactatgagaacgtgaaaatgcggctcgccacgttgccgggtgcctatgtgtccgccgaactggcgcgctaccccgaagcggtcgccatgttccttggctcctatgtcggggcgcgcggcgaatccgtggtcgccgtggatatcacgcgcgtgccggaagccggcgttcccggtgttggcgggattgccggtgttggcggtgccgtcggcggcgtgctcggcacccaggattccggcactgtggacggcgcgctgggcaagaacggcatcagcggaggtgctgccgccggaatacggcagccgggaaacgccaagggtaatggcggcgtagccgcagccaaaatcgccgggccgctcggtgtaccggattcggccgggcaaggtgcggacgatgccttcgatgattcggtcggcgcgcccgtacagcccttggccccgaagcccacgctgctgcaacaggccgtgacccggttcgactgggtggacctgcgcggatttgcccctcactccaacgcgcgcgaggccgggcaagccaccagtgccatcaccttaagcatctggcacagccgccagcggttctgccccacctgtggcgcggcggtccggccggcgctcgccggatgggcgcagcgatgcaccaacgaggcggacggcaaccgtgtgctgttcccgcgcgtggagccggcggtcatcaccgccatcgtggacgggcacgaccgtctgctgctgcaacacaacgcggcatggaaggattcgaggctgtattcggtgtccgccggatttgtggaggcgggggagaaccttgaacacgcctgccgccgcgaggccatggaagagaccggcatcaagcttggcgaggtgcggtacctgggttcgcagccgtggccgttcccggcttcgctgatgatggcgttcaaggcacatgcgatcaccaccgacgtgcgtgtggacggcgaggagaccatgaccgcgcgatgggtcacacgcgacgaatacacggccgagctcatcgccggccgtatggcggcgccgggccgcgccaccatcgcccgctacatgattgaggaatggctcggtcgcgagctgtgacggaccgcgaagataggttaggcttatgactatgagtgatgacaacgaaaacgaacagccgctgaatctcgacattcccgaccacctcgaatactccgaggaacatgcatgggtggaccgttcggtcgaccccgcaatcatcggcattaccgaatacgccgccgaccagcttggcgaacttgtgtttgtggatctgcctgagcctggcgcccgtgtggaggccggcgacgagatcgtggagcttgaatcctccaaggccgtccagccgctgatcagccccgtggcgggtacggtcaagtatgtgaaccgtgacgtggcggacgacccgtccgtggtcaacggcgatccgtacggcgaaggctggctgctgaaggttgagcttgacgacgatgagccggagctgctgagcgccgacgaatacgcgaaggtcgtgcggtagttccttttgagctcccctctctgaggggagccaagaaaatgaggcgtatggcctatattggtgtctatgagaagcccacgcgaggattttgaggcggcaggcaagcgactgccttgggatgctgctgctcgcagtgcagcgctgtccgccaccgcgccagtctctgacgtcaaggcatccgccaatggtgccgacaatgccagcaacgctgaacattccgatgacatgcccaccgtgccgattcccgcacgcaaggctgccacgacgttcgacaccccctccaagcgtgagcgcatcgaagtcaagccgccgatcacccgattcatacgtcgtgccgtcacccgcgtgttcggcgtatggtcacgcatctccactcaggtggtgcgccaatgggactggtatccgcgagtggaaccctatgtgggttatggcaccggcgattactcgcgtctgatctgccgcacggtatacgcccccaggcacgcgcaatccggcgaactgatccgcggcatccgcggcatgcttgccatacccgcgccgcgcacccacgtgcaggccagcattgatgacatgccgctcaacaccgtgcagatcggcgtctccgaggtctatgacaaggtggaccgcacgcgcgatctcggcagcgaatacgccatctccgattccgccggatatctcgacctcgtggccgagcatcgtctggtgcccggcatccatcgcgtctcctacagcgtggccaaccgcaaacccgtgagcgccaacctgtacaccatccccgccagtgccaaagtcggcatcatctccgatgtggacgacaccatcatgatcacgcaggccccggtgccatgggaggccgcgtacaacctgctgttcctcgaccccaagaagaaagcctccgtgccgggcatgagcgtgctgttcacccgcatcgccgacttgttccccggcgcaccgttcttctatctttcgacatcgccctggaatgtggagagttcgattcgcaacttcatcactgaccatggtttccccgaaggcccgctgctgctgcgcgacctcgacccgaggcccaagaccttcgtacccaccggcccccagcacaaacttgagtttgccgaacaacttatggccgacttcccagacatgaagttcattctggtgggcgatgacgggcagaaagacccgaccacgtacgccaccatcgcccgcagatatcccggacgtgtactggcgatcgtcattcgtgagttgagcccgcgcgaatcaaccggattggcgtcggtgacggggctcacctcgacccagccgactccggtaaccgatgtgccagtattcaccggcaccaccggctcgaacattctgaagaccatgctgccgtatctgaagacggtgttgcgataggcgcggcgtgatgaacactgaatgcgtcccggtgcggtgcctcgcctataatcgcgtggtatgactgacgagagcacaaacgccgcggccgcgatgccgccttacgccaagcgcgagccgaagcgccgcgaattccacggtgacgttttcgaagacgattacgagtggatgcgagacaaagactccgatgatgtgcgcagctacgtagctgccgaaaaccagtactgcgagcgtcgcatggcgcatctggcggatttccggcatacgttgtttgaagagctgaaatcgcatgtggaagagactgatatgtcggttcccacgcgcgtcaatgattactggtacttcacccgcacgcagcagggcaaacagtatggcgtgcaatgccgcatccccgtgcgcgatgccgatgactgggacccgccggtcgtggatccgcaaggcgcgcccggctccatgcccggtgaacaggtcgtttttgatgcgaacaaggaatccgaggggcatgacttcttccggctcggcggcttggatctgagcaaggacggccgttggatgctgtacggcgtggatgttgcgggagacgagcgatatgatttccgcattcgcgaccttgccgggctggagaccggggagccggtcagcgaactgcccgaacagttcaccggcattggcagcgcatgcttcacgccggacggccaatgggtgttctgggtggaattggacgattcctggcggccgctcgctgtgtggcgtcatcgtgttggcacggcggtcgaatcggatgtgtgcgtgtaccgagaaaccgatgaacggttctgggtgggcgttggcatcagttttgatgagcgcaatatcgtgatcggcaccggttccaaaaccaccaccgaagtgctgatgctgccggtggccacgcctgaaggcgaattccaagctttcattccgcgtcagaacgatattgaatatgatgtgagctttgcctgttttgaaggcgcgggggagaacggtgcggatgtgccactcgccgtggtctatcacaacgctgccaatccgaatttcgaaatcgacgtcattgacatgcgtggccatgagccgccgtaccgactcggcgaaggcgtgtgcattgccgccgggtcgccgtacggctgtgaacatggtgagccggataagccgattaccgaggcatacttcaacgccgtcaatccggcgatattgcagggtgcccacggtctgggcatcgaaggcatcgcgttgcatcgcaactttgtgtccctgagctaccgtgccgacggccagccgcacgtggcatacatgaccaagagcgcggctgccgccgacttcctggccggacggccgtggcggtttacggaattgctgccgcctgccctggaggacgactgggacatggttgccgacgatcgcgaaaacttcaccggcgatcatggcgaaatcttgtggaccgaagatgaggcccccacggatcacacgtcatcttccgatggtgctagcgacgaccacctgcccggtgagacccggcgcttgtacaccatcggcgtcggcggcaacccctcgtatgaggcgccgcgcatgcgctactcgttcgccagctacacccgcccgggcgagttgcacgaaatcgatcccgccaccggtgaagatgcgctgctgaagcgagccaccgtgttgggcaacttcaatccacgcgattacatggaacgccgtgtgtggattaccgcgcgcgacggcgaacgcattcctgtttccctcgtctggcaccgcgattgcccggcgcaggattcgccgatgttcattaccggatatggtgcatacgagatttcctccgatccggggttctcggtctctcgtctgagcatgttggatcgcggtgtgctgtacgccgtgccgcatattcgtggcggcggcgaaatgggacgcgcctggtatgagcaggggcgcagactgaacaagaagcattcctttgaggacttcgtggacgccacacgcgcgctgcagaaggcgcatttggctgatgcttggcgcaccgtggccaacggcggatccgctggcggtctgctgatgggcgcgattgccaatatggcgcccgaatgctacgccggtgttgaggcggatgtgccgttcgtggacgcgttgacctccattcttgacccggacttgccgttgaccgtcaccgaatgggacgaatggggagacccgttgcatgaccctgaggtgtatcagtatatgaagtcgtacacgccatacgagaatgtgccggtcgccgtgctcgagggcggcaacgacgaggctgccggtgacggcagtgctgatggggctgccaccggcgcggtcgccgccgcgcaattcccgagaatcttcattaccacctcgatgaacgacacccgcgtgctgtacgtcgagccgctcaaatggctggcccgtttgcagtccgccggcgtggacgcggtggccaagattgaggtcgaggccggtcacggcggtctatccgggcgttacaagcaatgggaagaggtttcctatgagaacgcttggtgcatggatgtgatggggctcgctcattaggccatgtccactagctgagcgggttcgggccggcaggtgatagcgcgagtaggctccttgaactatggcaaagacatataaaatcgccgttattcccggcgacggtattggcaaggaagtcactccgtgggctcagaaggctttggaaaaggccgctgaaggcgtagctgacttcgagtacgagaacttcgacttgggtgccgagcgctatctgcgcgatggtgcgatcctgcccgaggacgaagaggggcgcatcaaggccaacgacgcgattctgctcggtgccgtgggcgatccgcgcatcaaggccggcattctggaacgcggcctgctgctcaagctccgcttcgacctcgaccagtacgtgaacctgcgcccctccaagctgtacaagggcgtcacctcgccgctcgccaaccccggcgacatcgacttcgtggtggtgcgtgaaggcaccgaaggtctgtactgcggtgccggcggcgcggtgcgccgcaacaccccgcaggaggtggccaccgaggtgtccatcaacaccgcatacggtgtggagcgtgtggtgcgttacgccttcaagctcgctatgaagcgcaagaagcacgtcaccctggtgcacaagaagaacgtgctcgtcaacgccggtgatatgtggcagcgcatcgtcgacaaggtcggcgaggaataccctgaggtcacccacgactaccagcacattgatgcggccaccatcttcctggtctccgacccgagccgtttcgatgtgattctcaccgacaacctctttggcgacattctgaccgatgaggccggctccgtggtgggcggcgtgggctactccgcctccggctgcatcaacgcctccgacgagttcccgtccatgttcgagccgattcacggttccgctccggacatcgccggtcagaacaaggccaacccgaccgccgccatcctctccgccgccatgctgctcgagcatctcggctttgatgatgcggccaagaagatccataccgccgtcgaagcggacatcgaggagctcggctccaccgtgcgctccaccgaccaggtcggcaaggacattctggcccgcatgtgacctcaaacttggctcccctcgctgaggggagccagaaaactctctatactgagttgcatgcaaatgcgacatggggaatgcaaaaccgttggcagcaaactagtcgccgtgaccgtatccgtcgatgatgacggcaccgcacagtcatgccatatcagcggtgatttctttattgaatcagtttcggatgccgaatctcatgctttgttgcatgacctggaacgagctctaattagcgatgattcattgcggtccgtattggacgcccatcctagttgccaaattatcggcacagatgaaattgccatcaaaaccgcatacagccgagccgtaagcagcaacttacccccgctggcgggggctccagcgcagcgggtgggggtgggcagccccgatgcgccgaacatcccagcatccatcaatacacaaaccaagcagcccgacaaaagctctgaataccgggagcgctggaacgccctcaagcctcaactcaccgtgatccacggccatccgcgtactccggacgagcaaatggccattgacgagacctgggcgcgtgaagtcgcagcaggaacacgacagccgaccatccgattatgggagtgggcgggcccggctgtggtcatcggccgtttccaatcggcccaggacgaggtgaatctggacattgccaagcagctcggcttcgacgtggtacgccgttgcacgggcggcggagcgatgtttatcgaaccgggcaacaccattacctattctctgtatgcgccgctcgatttcgttcagggcgtaagcatcgaagaatcctaccggctctgtgactggtggctggtcgaagcgctgcgcgaacttggtttagatgtgcggttcgcgggcctcaatgatatcgcctcgcagtacggcaagatcgggggagcggcgcagcggcgcttccccgtaggctcaggcggcgcggtgctgcaccatgtgaccatggcatatgacatcgatgcggccaagatgagccgtgtgctcaacaccagtcgcgagaagatgtcagacaaagcggtgaaatcagcggtcaaacgcgtggacccgatgaaaagccagacgggtctcagccgcgaacacatcgtcgagcaccttattgactggtttgcggcgtgatttcaccgatggccgtatacgattttgccgctggccgtgcgcggttttgtcatgggcgagcgcggtagccgcgacagtgccgtttttcgcggtaacgcattcgtcagcatgtcgtacggctatcggatcgtgccacacatgaagtgacgaatgagggcatgctcctgacgaaacctgtggggcgcgttacaatatgacggatgggcgacgacggtcataggacaataaggatggtgcgatgagcttggaaacgccaaacgcttttgctgacgaggaaaacatcctgttgcatacggcattgttcaagcaggtatcgccagccgaagccgaggagctgttgccgcatttgaagcatgcgacgttcgataaaggcgactatatcttctccgaaggcgataccgatcagcgcatgtatttactggagcaggggcgcgtcaagctgattcgcacttcttccgatgaccgcgtgcagctgctgtccatccacgcgccgggcgaagtgcttggcgagattccggtattcgaccctcatggtggcccgcgcaccgcgtccgcggtgtccatgagccatggcacgcgcgtggtctggctggagcatgatgccctgttcgcatggcttgatgagcatccgcgtgtggccatcgacatgttgcaggtcatggccagccgccagcgcggcaacaacgaacgcatctccgacttggtattcatggatgtgccggcgcgtctggccaagacattgctcaacttgggctcacgtttcggcgagccggtggaacagggcctcaaagtgccgcatgacctgactcaggaagagctggcccaactggtgggctccagtcgtgagaccgtgaacaaggcgttgatggacttttccaaccgcggatggatcgcacgtgacggccgatcgatcatcatcttccagcccggtatgctgattcgacgctcgcggcgctgaccgttcggctgacttccagccaatgttacgctagtgcgattcttgtgatgatatgttcacgggagctgaccgtaagcccggttggtagggcaccccatttagaatggggcccatgcccaaaaagaagtccctcactctccaacgtgtgcttgttctcctcttggcctatatcatgcttgccgtctgcggcggcgtggcggccagcgtgttgtttgtaccgggtgtgatcggtgccaataaagccgccaaagcggtgattccgtcgctcaaggtagaaaacgtggacttcgacgtgactagtctgccccagaagtcgacgatgtacgcgcgagacggttccaccgttatcgcgacgttctacaaccaaaaccgtatcgtcgtgccgctgaagaagatttccaaaaccatgcagcaggcagtggtggcgcgcgaagaccgtcgattctggactcacgccggcgtcgatgtgcaaggcgtgatgcgtgcgttcgtgcagacctacctcgtcaaaggctcccagcagggtggttcgtcgctgacccagcagtacgtcaagaacgtgctgctgatgcaggcgatcgaggatgacgattcgatcgcccagtaccatgccactgaagacaccatcgcccgtaagattcgcgagatgctgatttccgtgcagatggaaaagaagtattccaaggccgagattctgcagggctatttgaacatcgcccagttcggcaacaacctgtatggcgtggaaaccgcggcccagcgctacttcagcgtgtccgccgccgatttgaacgtggtgcagtccgccaccatcgcggctatcaccaagaacccaagcctgtacgatccgctggtcgaagagaaccagaaggaaagcgaaaaccaacgcaatatcgtgctcaagctgatgctgcaggaaggatacatcacccaggaccagtacaccgaagctgtgaacacgccgttgaaggacacgctgaaagtacaggacgtgaatgtcggctgtcaggacactggcgattacgcgtacttctgcgattttgtggtgcatcgcatccagaactccgaagaattcggcaagactcgtgccgagcgtaacaagctgctgcaggagggtggcctgaaaatcgtcaccacgctggatgtggaagcgaattccacgatgatggagaccgcgcgtaataccattccaccggacgatcccagcggcatggagatagccatggccgcagtcaaaccgggaaccggcgaagtgctgagctttggcctgaatcgttactatgacgccactccggcagccgcgaacgatcccaccaggacgagccagaactatgccgtcgatttggcggatggcggtggttctggttggaccatcggttcgtcctggaagccgatcaacctgattgcgtggatggaagcgggccattccatcaacgacaacctccagacctcgacgtcataccccactacggacttcgcctgcagtaactattcgggcggtgccgattcgtggaacgtgtcgaacgccatgggcgcaggtacagtgaacccggaaagcccattcctcggtctggtccgttcgcataacactactcaggcttccatgggtgccatcctcaaactgtgcaaggtggcggacaccgcgactgaactgggataccatgacgccgccacgggtgagaccatcgacaaaacccaggtgtatacaccatccatgatgatcggctcggtgaatgtgtccccgctgaccatggcgagcatcttcgccgtatacgcctcgaatggtgtgcaatgcaacccgattgccatcagcaaggtgaccgataaggacggcaacgatctcaaggttccatccgcgaactgccatcaggcggtggataaggacatcatccaaacactcgcttataccctgaaccaaggtacggtgcggccggatggtgccggttggtcattcagattggctgacgggcgtaagtcgtttggtaagaccggtaccagtgaggatcttgcggtgtccggtggatcgttcattcctaatcagattgcggcgttcgctgtggtcggcgatgcacagaacccgtacaccaaccgtatttccaacattgccatcaacggccggtacaacagctattgggatggttcgacaatcgcggctccggccgttaccaacttcttcaatagctacatttccaagaagaaaataccgattgacaacgattacggccagcccgtctcgaagtacaccacgactggcaagtatctgggcattggcggacgaacgttcagcgtgccgcagaccactacgaatggcaacagccaatcgcagagcagcaacaatcagtctcagtcgcagaacactgggcaaaacaacacccaaacccagggcaccaattcagagcagtcgaatgatggccagtgattggtgattggcgtttgacatttggtgattgcaggccggctgagtctacgtaacatggccgactgcgatacccaaattacgtagtttgcgggcgttacctgtttcaggtgacgcccgttttacaatacttaatgacaacgccatcgcgttcatcgaatatttgccatgaacgtgcatcggaaaggggaacgatgagcaacgacgatctgacgcatgagaattttgattttcgtggattcgacgtgccggatctcaaagcggtgacgctggcttcgtcttcggacggcgatcagtccaagcagccgaagaccaagcacgaggatgcatcgaagaaccgtaagcacggtaagaagaagtcaaaatccgacgcacggtccaagaagcgggccggcgcgggcaagacgagcgaatcgttcgatgattatgaggattatgaggaaagggaagctgtgagcaaggcagataagaaagtcagcaaggaccgtccggggctgtttgcgccaatgacgctgcgcgaggtgaccgtgcgtaatcgtatttggttgccgccgatgtgcacgtattcgtcgttcgcccgcgatggtaggcccacgccgttccactaccagcattacgtgtctcgcgcgttcggcggattcggcatggtgattgtcgaatccaccgccgtggctcctgaggggcgtatcacgccgtgcgatctgggcctgtgggaagacgggcagattgatgcttggcgctggatcgtggacggtattcgcgaggcgggtgcggtgcctgccatccagctcaaccatgcggggcgtaaggcttcgactggttgctttgccgttggttacgacggtcagaacgtgccggaggaggcgggcggctggcctaccatggcaccgtctgaaatcgcgttcggtgggttgcgtacgccgcgcgcgctgtccgtggatgagattcatggtctggtcggcgcgttcgccgtggcggcgggccgtgcggtggccgccggcttccaagcgattcagattcatgccgcgcatggctatctgatttctcagttccttgacccgctgagcaatgagcgtgatgacgaatatggtggcgatttgaccggtcgctctcggttcctggtcgaggttgtggatgccgtgcgtggggccgtccctgagggcgtgccggttctggtgcgcatttcggccacggattgggccgctggcggttgggatttggatcagaccattgcactatccaaggtgctgaaggagcatggcgtcgatgtgatggacgtgtccactggcggcatcatgtcgggagtgtcgattccggtcaagccgaactatcaggtgccgttcgccgagcaggtcaagtccaaggccgatattccggtgaccgcggtgggtcttatcaccaagccgaagcaggcggccaagattttggcccgtggcgaagccgatgccgtggaaattggccgcgccgcattgcgcgatccgtactggccgttgcgtgcggccaacaagctgggcataccgtccacagaggtcccctacgccccgcaatacgtggccggtgcgtactgaatcctcatggggcggtgactttcccatggggcggtaaaaccctcatggggcggtaacccaaaacggcggtattctgcggaatgtgaaatttggctaaccgccccatgggacaatcaccgccccatgagggttttaccgccccatgggtaatagggcaatatgtgagttcactccacgtccacgccgacggcgtcggagacgtgctcgaatccgtcgcggcgcagcagctgggccagaccgcgcttcaacacggtgatctgctgcgggcctcggtacatcagcgagctgatgaacatgaccaggctggagccggaacgaatcttcgcataggcttgctcgggggtaaagacgccaccgatgccggcgatggcgaaccggtcgccatactccttatacaccttgcgaatcagctcggtgctggcgttggtgcacgggccgccggacaggccgccctcccaatcgcgcggaatctcgaggccggtgcggtccttctgcagattggcgatggacagcccctgcacattgtgctcggccagcacatcgagcagctccttgtactcgccccacggcttgttcaacggcatcttgaccagcgtgggctgcgggcggtcgatcttgtcgagcgccgtaaacagacggtcgagcgcttccggagtcgcggtgaacggttcgccgacgtgcgtgttcgggcaggagacgttgacctccaccatcgcggtgcggccggcggcgcggcgcatcgaaatgcagtaatcctcaatgccttcgtcccaatcgccgcactggtcgtcgttggtgcgggcgatcgacacagacagctgcatctggcgggcctgagtccaagccttctcggcgcgctcgatgaccttgtccgaaccgatgttggcgaggccgacgtgcaccatcatcgaatcgtattcaggcagacggtggaaccacggcttggcgttgcccgggcagggacgcgaggtggtggagcctacggtttcgaagccgaagccggcatggtccagcaccacgggcatctcgcagttcttgtcgaggccggcggacaggccgaacgggttggtgaaatcgacgcccatcacattcgtttccagaatggggtcggtgtagtcgagcatcagctgttcggcgatcagcagcggcgggacgttcttgacgacgtggcagaactcgatcatctgatcgtgtgcctcatcggggcggtggttgaacacgaagttcggtttgatgatgtgcttgtagccgaaggtgaacagatcggtggtggctttgttgacggcgtcatgccagaagctttcagaaacgtaagtcataccgcctattgtctcacgcttgggccggtgcggctaggcgattcctacctaggcgaattggggaagggggctaccgctgtgagaatatcggttcgcgcaatgtgcgattttgcgcggttttgtggaaatgacacctgaattgcccggaattttcgagaaattgtccccaaaacgctcaagccggtttggtttgtgagcttttgtgtgcgataatgttcgcatgatttcgtcacaacgtcagcacctcatcttgagcaggttgcgcacacgcggggcagtgcgcattacggcgctatcgaaggaactgggtgtgtcggcgatgaccatccgccgcgatatcgccgaacttgccgacaagggactgttgaagcgcgtccatggcggcgcggtgactaccagtaccttgctcagcgaacccctgttctccgtcaagtctcagatggatatcggcctgaaggacgccatcgcccaggaagccatcaaatatgtggctcccggcgatgtaatcgccatcggcggcggcaccacggcctatgtcttcgcccagcatctgctcgaatcgcagcagtccagcggcatcaccatcctcaccaattcgattcccgtggccgaactggtccaggccctcgaatccaaggacgtggaggtgatcgtcaccggcggcgtgatcacccgatcgaactcgcttgtcggtccgatcgcggacaaggtcgtcgcctcgctgcgtgtcaacaccgtattcctcggcacccactcggtgtcgattccccgtggcttcctgatgccgaattcgctggaagccgcaaccgatatggcgatgatggacatcgccgatcgcaccatagttttgaccgatcacaccaagtggagctgcacatcgctgtcgctgtttgcgcgcttcgaccaagtgaacacggtcattactgacgacgggctcgaccccgactccgccgccaaaaccaaggatttggtaaaggaactcgtgctggcccaccagagcgagaccattgaggaaagtgagtaaacccatggctgatttcgccaactacacccccggggagtatgcgaaggagcacatccgcatcacgccgacgacgcttgccgacggtcgtgacttcttctacctggacgacgaccccgagttcgtctccggtgccaagacccgcgagctcaaggacccgcgcccgctggactaccgtttcgccccgcacctggacgccgacggcaacgaagtgccgtacgccgccccgcagatgcgccgcgacccgctgaccggcgactggattccgatggccaccgcccgtatgaaccgcccgatcaccgccggccccggcgccaccgccaagggcaacccgctggccgcccgcaagcccggtgacccgtaccaggacggcgaagtgccggacaccgactacaacgtcgtcgtgttcgagaaccgcttcccctcgatggtgcgcgtgcccggcgtctccgaggacgtgacctacgttgacggcaacccgctgtgggagaagaagctcgccgccggccgctgcgaagtcatctgcttcgacccgaacgaggacggcctgccggccgatctgccggtctcccgcctgcgcaccgtggttgaggcttgggccttccgtaccgccgaaatctccaagatggaaggcatcgagcagatcttcccgttcgagaaccacggccaggaaatcggcgtctccctcgcccacccgcacggccaggtctactgctacccgttcatcgccccgaagatggagaaggaactccagcacaccgaggcctaccatgagaagaccggtggcaacctgcttaaggacatcatgaacgccgagctcgaagccggcgaacgcatcgtgatgcgcaaccacagctgggtcgcctacgtgccggccgccgcccgttggcccctcgaggtccacgtggccccggtgcgcgacgtgctcaccctcgaccagctcaacgacgaagagcgctgggacctcgcctccatgtactcgcacctcctgaagcgcggcaacgccttcttcgacaagggcgacggcaagggcatggacctgccgtacatcgccgcctggcaccaggccccgatccacgacgcccgccgcgagaactaccgcctgaacctgcagttcttctccttccgccgcgccgccaacaagatcaagtacctcgccggctccgaatccggcatggccgcctggatctccgacaccacgccggaactcatcgccaagcgcttccacgagctcggctccatcgacatcgccgactgatagaaagaaaacatcaatgactgctgttgaattcattgagccgctgacccatgaggaaggcgtctcgcaagctaccaagctgttcgtcgatacctacggcgctgcgcccgagggcgtgtgggctgctccgggccgtgtgaacctgatcggtgagcacaccgattacaacgccggcctgtgcctgccgatcgcactgccgcaccgcactttcatcgccctgaagccgcgcgaagacaccaaggttcgcgtcgtctccgacgtggctcccgacaaggtcgccgaagctgatctcgatggcctcaaggcccgtggcgtggacggctggtccgcctacccgaccggtgtggcctgggcgctgcgtcaggctggtttcgacaaggtcaagggctttgacgccgccttcgtctcctgcgtgccgctgggctccggcctgagctcctccgccgccatgacctgctccaccgctctggctctggacgacgtgtacggccttggctacggcgattccgacgccggccgtgtgaccctcatcaacgccgccatcaagtccgagaacgagatggccggtgcctccaccggcggtcttgaccagaacgcttccatgcgttgcaccgccggccacgcgctgctgcttgactgccgcccggagctgaccccgctggagaacgtctcccagcaggagttcgacctcgacaagtacaacctcgagctgcttgtggtcgatacccaggctccgcaccagctcaacgatggccagtacgctcagcgtcgcgccacctgcgaggaagccgccaagattctcggtgtggccaacctgcgcgttaccgccgacggcatctccaaggccgatgaccagttccaggccctcaaggaaacgcttgacgccctgcctgatgagaccatgaagaagcgcgtgcgccacgtcgtcaccgaaatcgagcgcgtgcgttccttcgtgcgtgccttcgctcagggcgacatcaaggccgcgggccgtctgttcaacgcttcccacgattcgctggccgccgactacgaggtcactgtgcccgagctggacatcgccgtggacgtggcccgcaagaacggtgcctacggtgcgcgtatgaccggcggcggcttcggcggctccatcatcgcgttggtggacaagggccgttctcaggaagtcgcccagaagattgccgacgagttcgaaaagcagggcttccacgctccgcgcgccctcgcggcttatgccgctccgagcgcttcgcgtgaggcctgagcccgcatctgagctccctctgacgagggagcttcgttttatcccgcgacacgcggggcggacttacgaagaatcttgaatcgtattacggtgacggattgttttgaaaatcgcatggcgtctgccgaaatcacatggcagacaccatgcgttttttattgccgtcgttggcccggacgttaggggcgtaacgacattttcgcgcgacggcaatctgaagagacaatccgagagaggttccgttgtccgctatccagacaacttccgataacatcatgcccgccggcgaatccggcaccgcttattcccatagcccccacaacgcttccgaaaccaggcatttcgaccatccgcataaggtgatgctcggcctgtacatcggcgcatttctcggcatgctgtccgagacatccatgaacatcgccctgcctgatctgatggacgagttctccgtatcctccggtaccgcacaatggatggtcgtcggctatatgctggccattggcgtggtgctgccgtgcgtgggtttcatgctcaaatggatcaaagccaaaacgctcgtgctgttcgcgctgacctgcttcctcgtcggtgccttggtatgcaccgtggccaccggtttccccgtgctgctcgccggccgaatcgtgcagggcatcagcaccggcatcgtgctgcccccatgtacgcatcgatcatgcgcgtatttccaccgtataggatcggtgccgccaatggcgtggccggcctggtggtcatgttcgcgccggtcatcggccccaccctggccggcgcgctgattggcgcgttgagttggcgtgcgatctttgcactgtttgcggtcgtcgctgtcatcgccattgtctgtatagcggcgttcttcgtcactccgattgaatgcacgcgcccggcggtcgatatcctatccatcatcgcctcggcgttgggctttggttgcctcgtggccggcgtgagcctgatcagcgatatgggcttctccgcggcggtagtcggtttgctggtgatcggcgtagtcgtacttgctttctacgcttaccgtcagctgcacatcgccgatccgttgctcgatctgcgcgcgcttggcattgcggcgttccgtacgccggccatcatggtcagctgctcgttcgcctgcactttggcgttcatgtacttggtgccgcaggaattgcagcgcggactgggcatgagctctacgctcgtcggtctgctcatgctgcccggcggcatcgtcaacgcggtgtgcacgttgatggccggtcgcctgttcgaccgtcatggtgcgagggtgctcgtgtggatcggtgtggtgatggcagccatcggtggtgcgttgttctttgccatcggtgttgactcgggtgttgtgctgttcttggccgcgcacatcatcgtgatggtgggcattccgttcatccagcagtcggcgcagtccgctgcgctcaaatcgttgccgggccgcatggctgctgatggcagcaccattctcaacaccatgcagcaggtgtgcggtgccatcgccaccgctgtggccacctgcctgctgggcctggggcagaccggttatgcggccggtggcggtaccaatgccgcgcagggcttcgtggacggttcgcgctacggctatatgttcggtttggtgcttgtggcaatcgtgctggtcttctcctttatgctcaagggcggcaaggaagaaccgaagctggtgccggtgcgggtcgacggcggtgcggttgagagtctggccgtgtgaacatggcccaacggactcgatgattcctgagagtccgcgaatccggaaatggaacagcatgaatggcgtgatgcaggtttgtgacttgtctgagctgttccattctggcggtattggtgcctggcaacggtcagacgacagacgatacatgaatcggtaatgaacataatggcgggtgtcttccctatacttggggagtcacccgcttttcgtatacgaccagggagagccatgaataaggccatcatcaccgtcgtcggtcaggataccgtcggcatcatcgcgcgcgtttgcacctatctgtccgagcacaacgtcaacgtgcttgatatttcgcagaccatcatcgacggatatttcaacatgatgatgattgtcgactatgccaatgcggacaaggactttggcgccatggtcggcaaccttgaggatcttggcgacgacatcggcgtgcgtatccgctgccagcgtgaagagatcttcaccaagatgcaccgtatctgattctgatatagctttcgattccctcccgctggcgggaggtggcacatagcgccggtgggtggtctcatgttggataccacccccagtcggtttcaccgacagcccccgccagcgagggcgaaaaaacaaccgtaaggaacacaccatgctgaatatcatggaggtccacgagaccaatcagatgatcgagcaggagaagctcgacgtccgtaccatcaccatgggcatctcgttgctcgactgtgcgacggacaacgtcgacacgacttgcaacaacatttaccgcaagatcaccacctacgccaaggatctcgtctccaccggtcaggccatcgagcgtgactacggtatcccgatcgtcaacaagcgcatcaccgtcaccccgatttcgctggtcggcgccagctcctgcaagaccagcgaggatttcgtcaagattgctcacgcgctggataaggcagccaaggaagtcggcgtcgacctgatcggcggctactccgcgctcgtttccaaggccatgaccccggctgaggaactgctgattaaatccctgccgcaggcgctttccgagaccgacatcgtgtgctcgtctgtgaacgtcggttccaccaagaccggcatcgacatgaacgcggtcgaactgctcggccacatcatcaaggacatctccgagcgcaccgccgacaacgactcttacggctgcgtcaagttcgtggcgttctgcaacgtgcctgacgacaacccgttcatggccggtggcttccacggcgttaccgaaggcgacgcggtcatcaacgttggtgtctccggccccggtgtggtctcccgcgcactcgatgcggccaaaggcaaggacttcgagttcctgtgcgagaccatcaagcgcaccgcgttcaagatcacgcgcgtgggtcagcttgtggctcaggaggcttcccgccgtcttggcgtgccgttcggcatcatcgacctttccctcgctccgaccccggccgtgggcgactcggtgggcgaagtgcttgagaagatcggcctcgaacaggttggcgctcccggcaccactgcggccttggccatgctcaacgaccaggtcaagaagggcggcatcatggcgtcctcctacgtgggcggtctgtccggtgcgttcatcccggtctccgaagacaagaacatgattgacgctgccgcctccggttgcctgaccctcgagaagcttgaggccatgacctgcgtatgctcggtgggtcttgacatgatcgccattccgggcgatacctctgcttccaccatctccggcctgatcgccgacgaagccgccatcggcatggtcaaccagaagactaccgccgtgcgtgtgatccctgtggcgggcaagggcgttggtgaaatggcgaacttcggcggcctgatgggctacgcgcccatcatgccggtcaaccagaccagctgcgaggcctttgtgactcgtggcggtcgtattcccgctccgattcacagcttcaagaactgaatcagtagggtatctgccttcaaagaggtacctctggctcttcgcggagagctatctgctttcagagaggtacctatatacggaaacctcgagtatgcgcgttggaatatcaacgcccatactcgaggtttcttaattgaagtacccctttgaaagcagaaagcattctgcaaacgcccgaatgtacccctccgaaggcagatatcggttcgaatgacctttcgagaggtctattcccgtttcaaggggctgatttcgacctttctggaggtctacttccgtttcgaggggctgatatatgcgaagaccccgagtacaagcgttgatatttcaatgtctgtactcggggtttcgtcctttgacagccccttgaaacggagatagacctccggcggatgtcgaatcagcccctcgaagcgccgatagacccattttctgcgttttttatgatggtcgtgctgcgaggctcagggttttctccctcacgcctgtcggcgttcgttcggcgtcgctactcgaaggcccaccgggccttctcctcagcgccctccagcgaagttgagttggcgccaggcttcgtagatggcgatggacgcgcaattggtgaggttcagggaacgcaaggacgggcgcatgggcagtcgcacttgttcggccacatgagggccctccatgatgtccatcgggtcggggatgtcgccgggctcggggccgaacagcaggatgtcggtcggcttgtattccacctcggtgtacagcttggtagcatgtgcggtgaacgcgatgatgcgcgaattgggcatggactccaccaggttgtcgaaattcgggtgcagcaccacgtgggccatgtcgtggtagtcgaggcctgctcggcgcagcttggtgtcgcgcaggttgaaacccaacggctccaccaaatgcaggatggtgccggtcaccgcgcacaggcggatggccgagccggtgttgccgggaatgcgcggtgagtagtagcacagatgcggtgttacggtttcggtggtggcggccttttcagccgagagcatcgcgtccaccacggagatggggttgccatgcgcgtcggttacgagttcgtccggtccgtaattcgatttacggtacccgtactcgaacatcttctcgacttttgtttcgggattctgtgcgttctgcgaattctgttctgcctcgttcgtcatagctgctaagaataagaacgatgaacgacacagcaatttctttgcgattgggcgcatggtgggaggccaatgcgcgcgatttgccatggcgcttcggccgggccacgccgtggggcgtgctggtatccgaagtcatgagccagcagacgcagatgagccgtgtagtgccgtactggaccgactggatggaacgttggcccgacgcccgcgccctcgccgaggcccccaaggccgaggtgatcaccgcatgggggcggctcggctatccacgccgcgcattgcggttacaggaatgcgcccgcgtggtggctgaagattacgccgacaaactgccgcgcacgtatgacgaactcactgcattgcccggcatcggcgattacaccgcctccgcggtgatgagctttgcgttcggcgaacgaattgccgtgatcgataccaacattcgccgcgtgctgagccgcgtgttcctgggcgtcgaatcgcgcgggggagcgaccagcccggccgaacgcgcgctggcgaaccgcatgctgcccaaagacgagattctcgggtgcgatgctgacgtcgccgataatgccggtagcgccgaacatgtcgtgaacagcactatccgtggcggcaaacgctctcgactgcatcgtggcgagcgcccatcggtcacgtggaaccagtcggtgatggaactgggcgcggtgatctgcacggccaagtcgccgctgtgcgacacctgcccgattgcggacgactgtgcatttctcaaggccggccgccccggactgggggagcgccgcacccgcccacgccaacgattccaaggcacggatcgacaggtgcgcggtctggtcctcgccgcgctgcgcgagcttcccgctggagccacgttgcccagggaagatgccgacaagctttggaaggaccagattcagcttgccgcctgcatcgccagccttgacgatgacggcctgatagagattctggacggcggcctgcgactacccagctgacattgtgaaaaatggtgggctccccaagcgtgtatgggtgtggtgaccgtagactggaagagttatggcagtgcagaggaacacatcaggcgcgagaacggcacgcggagccggcaccggggccaatgggccatccggcgggccctcccaaaacaaccgttccggcaagccgcgcaagcgcaggatcagcaaaaagcagcaggccatctatcgtcgccggcgtatcgtggccggtacggtgttgctgctgataatcgcgctgatcgtattctgcgtgtacagcctcggccggggtatcggtgccgtgaacacgatgattcaccatgacgaggtgtatgcgatttcccgcgacgccacgccggcgccgaagaaagtcagcaacgtcaaggattgctcggccagtgatgtgacattgcagctttccgcggcctcccaatccgtgtcggtaggaggatcgcttgatttcaccgcgaccatcgtgcacgaggggtcaggcaactgtttggtggacgggtccgattccggccgtgtgctcaccattacttccggtcaggaaacgatttacaagtccgatgtgtgcccggcggattcacgtctgctgctgatggctaagggcgataaggacgttcagaaggtcacgtggaataccaatgcgaacgccacgctcaccgaatgcacggatgagtcggattgggccaaggtcaatgcgggaacgtacgtggcgcagttgagtttgaaggatcatccgaaggtgaagagcgatccggtgacgtttacggtggggtaggatctgcggttggcgtttggacgctgggtctctccctcagtctcgctccgctcgacagcttcctcgtcagcgggagctaaagatgtcctcgcatatcagtattcttttgactttgcatgaggtgtgtcatattgcgggcatgccgtcgacaatgaagcgtccgcataggcatatggtggccatgccggcgctcccaggggaattaccacatattagcgagcgataaggaacgtccattggctactgagtctacgacgaacaccaccaccatcatcgcacgcgccgaccagcatgacattgacctgcacaaggcgtcggatcgcgtgaacttcggttccatcaaggaacccatcgatgtgccctacctgctgggcgtgcagaccgacagcttcgattggctgatcggctccgaccgctggaagaagcgcgtcgaagaggatgaggctaacggcaccaacaccgtggcccacacctccggtctcgacgaggtcttcaacgagatctccccgatcgagaactttgcacagaccatgtccctgaccttctcggacccgtacttcgaggagccgcgccacaccgtgcaggagtgcaaggagaaggattacacctactccgctccgctgtacgtgaacgccgaattcgagaacggcgacaccggcgagatcaagtcccagaccgtgttcatgggcgacttcccgctgcagaccccgcacggtaccttcatcatcggcggcaccgagcgagtcatcgtctcccagcttgtgcgttccccgggcgtctacttcgaccgccagcaggatcgcacctccgataaggaagtcttcggcgcgaagatcatcccgagccgtggtgcatggctcgagttcgagatcgacaagaaggaccagccgcaggtgcgcgtggaccgcaagcgcaagcagtccgccatcgtgttccttatggccatcggcatgaccaagtccgagatcgcccaggcattcaaggactacccgctggtgctcgacgcactggagaaggaaaccctcgagacccaggacgaggccctcgttgacctctaccgcaagattcgtccggccgacaccccgacccccgaggccggcaagaacctgctggactccttctacttcaacaccaagcgctacgatctggcccgtgttggccgctacaagatcaaccgcaagctgggtgtcgaggccgatttcaacgatcgttccctccaccaggaagatatcatcgccacaatcaagtacctggtggccctgcacgacggtgcggcgaccttcccgggcaagcgcaacggcgaagatgttgacctgcgcgtggacgtcgacgatatcgatcacttcggcaaccgtcgtatccgccaggtcggcgagctgattcagaaccagctgcgtaccggtctgagccgtatggagcgcgtggtgcgcgagcgtatgaccactcaggacgccgaggccatcaccccgcagtccctgatcaacatccgcccggtgaacgccaccatcaaggagttcttcggcacttcccagctctcccagttcatggatcagaacaacccgctgtccggtgtgacgaacaagcgtcgtctttccgcactgggccccggcggtctgtcccgcgaccgcgcctccatggaggtgcgcgacgtgcacccgtcccacttcggccgtatgtgcccgatcgagtctcctgaaggcccgaacatcggtctgatcggctccctggcaaccttcggccgcgtcaacccgttcggcttcatcgagaccccgtaccgcaaggtcgtcaacggccacgtgaccgacgaggtcgagtacatgaccgctgaccgcgatcttgaccacgtcatcgcccaggccaaccaggagctcgacgagaacggcaacttcgtgcagaagtccgcccttgcccgagtcggcgaagaagaggcggtcgatgtgccggtgagctccgtggactacatggacgtctccccgcgccagatggtctccctcggcgcctccctgatcccgttcctggagcatgatgagggccaccgtgcactgatgggtaccaacatgcagcgtcaggccgtgccgctgatcgaatccgagcgcccgttggtgggcaccggctccgaatggcgcgccgccaacgactccggcgacgtcatcaagtccgagaaggacggtgtggtcacctacgtgtccgccgacctgatccgcgtgatgaacgacgacggcaccaccagttcctacaagctggccaagttccaacgttccaaccagaccacctgctacaaccagcgcccgatcgtccacgacggcgagcgtgtggaagccggctcggttatggctgacggccccgccatccagaacggcgacctggccctgggcaagaacctgctcatcgccttcatgccttggaacggctacaactacgaggatgctgtgatcatctcccagcgcctcgtgcaggacgacaccctctcctccatccacatcgaggagtacgagattgacgcccgcgaaaccaagctgggcgccgaagagatcacccgcgacctgccgaacgtcggcgaggacgccgtggccaacctcgacgagcgcggcatcatccgcatcggcgccgaggtcgaggccggcgacatcctggtcggtaaggtcaccccgaagggcgagaccgagctgaccccggaggagcgcctgctgcgcgccatcttcggcgagaagtcccgcgaggtgcgtgacacctccctgcgcgtgcctcacggcgagaccggtaccgtcatcggtgtcaaggagatcacccgtgaggatgccgaggaggacggcgacgagctgcccaacggcgtcaaccagatgatccgcgtctacatcgcccagcaccgtaagatcacggtgggcgacaagctctccggccgccacggcaacaagggttgcatctcccgcatcctgccggaagaggacatgccgttcctggctgacggtactccggtcgacatcatgttgaacccgctgggtgtgccttcccgaatgaaccttggccaggtgctcgaactgcacctcggctggattgctcactccggttgggacatctctttggatccgaatctggaagccgagtggaagaaactgattccgtccggtgccgagaaggccgagccgaacaccccggttgccaccccggtgttcgacggtgtcaagcctgaggtcctgaagggcctgctgtccaccacgctgccgaaccgcgacggcgaccgtctggtcggccccgacggcaaggccaccctgttcgatggccgtaccggtgaaccgtacaccaagccgatttccgttggctacatgtacatgctgaagctgcaccacctggtcgacgacaagattcacgctcgttccaccggcccgtactccatgatcacccagcagccgctcggtggtaaggcccagttcggtggccagcgcttcggcgagatggaggtgtgggcccttgaggcctacggcgccgcctacacgctgcacgagatgatgaccaccaagtccgatgacgtcgacggccgtgtgcgtgtctatggtgccatcgtcaagggcgataacctgccgccggcaggcatccccgagtcgttcaaggtgctcctgaaggaaatgcagtccctgtccctgaacgtcgaagtgctcaacgccgaaggcgtggccatcgacatgaaggatgaggatgatgatccggccagctccgctgacgacctcggcttcaacatcggcgcccgccccgacgcggccgccaaggaagaccagaaggccgaagagcccgaataccagtgatccctcgggctgcatgcggtcaatacgccgcgtgtagctccgccaacgtgaaataaataacgtacagagacctttccggtttgcactacccctcagtcagccttggctgacagctcccctgacaaggggagcttgggaaggtctcaagaacagaaacggattaacaagtgctggacgtcaacgcatttgacaagattcgcatcggccttgccaccgccgatgacatccgtggttggagccacggtgaggtcaagaagcctgaaaccatcaactaccgtacgctgaagcctgagaaggacggtctgttcggcgaacagatcttcggcccgacccgtgactgggagtgcgcctgcggcaagtacaagcgcgtgcgcttcaagggcatcgtctgcgagcgatgcggcgtcgaagtgacccgcagccgcgtgcgccgtgagcgcatgggccacatcgagctcgccgccccggtgacgcacatctggttcttcaagggtgtgccttcccgcctcggctacctgctgaacgtcaccccgaaggacctggagcgcgtgatttacttcgcctcctacatggtcaccgaggtgaacgaagacgagcgtcacaacgatctgcccggcctgcaggacgagttcgattccgagatcaagcgccttgagcagcgccgtgactccgacatcgaagcccgcgccaagaaggtcgaagaggatctcgccgcccttgaggaggccggcgaggccaagggcccggcccgcaccaagttgcgtaacggtgccgagcgtgatatggctgccatccgcacccgctacaacgaccagatcgcccgtgtggacgccgtcttcgacaagttcaagaagctcaagcccggcgacatggtcgacgacgtggacctgtggcgcgagatgcaggaccgctacggcgattacttcgacggctgcatgggcgccgaagccatcaagaagcgcctgcagtccctcgacctggagaccatctccaaggaactgcgcgaggagatcaaggacgcttccgaacagcgtaagaccaaggccctgaagcgcctcaaggtcgtcaacgccttcctgaccaccggcaacaagccggaggccatggtgctcgacgtgatcccggtcatcccgccggacctgcgcccgatggtccagctcgacggtggccgcttcgccacctccgacctcaacgacctgtaccgccgtgtgatcaaccgtaacaaccgtctgaagcgactgatcgagctcggcgcccctgaaatcatgctcaacaacgagaagcgcatgctccaggaagccgtcgactccctgttcgacaacggccgtcgtggtcgcccggtcaccggtgcctccaaccgtccgctgaagtccctgtccgacatgctcaagggtaagcagggtcgtttccgtcagaacctgctcggtaagcgagtcgactactccggccgttccgtgatcgtggtcggcccgtccctgcgcatgcaccagtgcggtctgccgaagccgatggccctcgagctgttcaagccgttcgtcatcaagcgcctcgtggacctgaactatgcgcagaacatgaagtccgccaagcgtcttgtggaccgcggcgacgccgaagtgtggggcgtgctcgaggaggtcatctccgagcaccccgtgctgctcaaccgtgcacctacgctgcaccgtctgggtattcaggcattcgagccgatcctggtggaaggcaaggccatccacctgccgccgctggcctgcgccgccttcaacgccgacttcgatggtgaccagatggcagtccacctgccgctctccgccgaagcccaggccgaggcccgctcgctgatgatggcttccgacaacatcctgaagccggccgacggccacaccgtgaccatgccgagccaggatatgatcctcggtttgtactacctgtccaccgtgctggaaggcgtcaagggccagggccgcgtgttctcctcgctggaagaggccgaaatggccctcgaccgccacgagatcgacatgcaggccaaggtgctcatccgcctgcccgagagcttcgtgctgccgaagaactgggagcccggcgaagtcaaggtgctcgacccgcgcgaaggcgaggacgaggtcgtcaaggaagaacgcttccacgacggcactgtgctgttcgccacctcctacggccgcatcctgttcaacgagaccctgccgaccgactacccgttcgtcaacgagcaggtggccaagggccgtctgtccaagatcgtcgatgacatcgccatgcgttactccacccagcaggtggccgccacgctggatgccctgaaggatctcggcttcacccgcgcaccgtggtccggcgtgtccttcgcgttctccgacgtgaacgagccgcctgagcgcgacgagaagatcgccgagtacgaggccaaggccgacaaggtcaacgccaactacgagatgggtctgttgaccgaggaagctcgccgtcaggaactcatcgacctgtggaccgagtgcaccgccgaagtgtccaaggaagtcgaggagaagttcgacccgacctccaacctggccatcatcgtgcagtctggtgcacgaggcaacatgatgcagatcaaccagattgcaggtatgcgaggcctcgtggctaacccgaagggtgagatcattcctcgtcctgtgaagtccaactaccgcgacggcctgtccgtgctggagtacttcatctcccagcacggtgcacgtaagggtctggccgataccgcactgcgtaccgcagaatccggttacctgacccgtcgtctggtcgacgtctcccaggacgtcatcgtgcgcgaagaggactgcggcaccaaggccggtctgcccatccgcgtcgccgagcgcgacaacgacggcaacctggtgctcgtcaaggccgccgacggtggcccgtactcccgtctgctcgccgccgacgtcatcgacccggccgacggacagaccgtgctgtacaagcgcgacgacgccctgtccatggacgtgctcaacgacctcgtggcccacggcgtcgaggaagtcaagtgccgttccgtgctgacctgcgagtccaagcgcggcgtgtgcgccaagtgctacggctggtccctggccaccaacaagctggtcgatgtcggcgagaccgtcggtatcgtcgccgcccagtccatcggtgagcctggtacccagctgacgctgcgttccttccactccggtggtgtggccgcggcctccgatatcacccagggtcttccccgtgtcaccgagcttttcgaggcccgcaccccgaagggtgaggccccgatcaccgagttcgccggcagcatcaagatcgtggagaacgatcgcggtcgccagatcatcctgaccccggacgccgattccggcgcaccgaaggaagacggcgtgatcaagccgatcacctaccaggtctccaagcgcgtgccgctcaaggttgccgacggcgaccacatcaaggtcggcacccagctggtcgaaggttctgtggaccccaagaagatcctcaccatcctcggcaagcgcgccgcccaggtcaacatcgtggaggaagtgcacaccgtgtaccgctcccagggtgtggatatccacgacaagcacatcgaggtcatcgtgcaccagatgacccgtcgcgtgaccatcatcgactccggcgacaccgacctgctgccgggtgagctggtggacaacgcccgcttccgcgagatcaaccgcaacatcgtcaagaacggtggccgtccggccgtcggtcgtccggcgcttatgggtatcaccaaggcgtcgctggccaccgactcctggctgtccgccgcatccttccaggagaccacccgcgtgctcaccgaagccgccctctccgagaaggtcgacgacctcaagggcctcaaggagaacgtcatcatcggtaagctcatcccggccggtacgggcctcgcgcgctaccgcaacgccgtggtcgagcctgacaaggccatccgcgacaccatctacccgaacttcggtctgggcggcgatggcgatctcggcgacgcgagcttctccgacgccgacctgtctgacctgaacttctcgaacctcgagttcggcgatctgaagctcggcgacgacttcaacccggatgatttctactccgatcagggcggtcagcctgacatcgaggagtaagtgagaaggtcctagaaaggatgccccttctaggactcagatcttgcgttaatcgcaataagatggcccggaactatatcagttccgggccatccgtatatttgccattgtgattttcctgttgaacaagagcaggcagccgctcgttgcttgattactcaagcctgtttttcggtgaactggaagaactggtctccgatacgcaccgtggcaggcgcgctgagcttgagcggtgtgcccttggtgacttgtgtctcttggccattggtgatgatgtaggtgccgttcaacgagccgtagtcctcgatccacagcgcgccatcggtgtcgatgctgatggcggcatggttgcgggatgtggtgcgggtcgggtctacgatacgcaccgccttggcaccctgcggcacatccatggaaggcttgcggcccagcaacgtgctcttatcgatcacaatggtctggccggtgacatcgttatgcagcaggtacgtcttcttcggtgccttggacgtgaacgaggaggagagcacggtgctgtcccaatcctcgatgtcgttttcggcggcgtgcggtgtggtgtctgccggagcggtggcagcgggctcagcggcggcggccgtggcggcaggctctgcggtaaaagcggtattggttgccgcttccgcggtactgggctgcccgtagtcgttctgcggttcggctgtgccaactgcggaatccggggtgccttccaccggatcgtcagaataccaacccagttcaggtgctggagggtagggaagtttggccatgatgatgccgtcctttcactgacgggaagccagagcggcgttgattgccgggtcgccgagctggcccagccattcgatcagtgccggataggtgttgggattacgtgcaatgcaggcgcgtagttcaggcgcgtactgggcaatctgggcgatttgcatctggtcggtggtggtcagggcctgttcggcggtgaaaccgtaaggattggtggccacaggctcctcgaatgccgcctgagccgcgggctgctgagcctgctcggcagcgggccgcagggccgcctgtgccggggcttcctgatcctgaaccggcccgccgaatgcctcggcagtgaacccgtattgcgccagggtctcgcgggcgcgatcgtcaccgaactcggcgatccaacgcttcaagccgggataacagcgcggattcacggcgacattggcaccgaattccggattctcgtaggcgatttttgccaacagaatcggatccgcgttcggatcttgtacggcagcgaccgcagcatcataatcaaccatgggattacctccttatgttcgctcggttatgccgaacgtatggtccgtagcgtttgtagtgttgcgtcttcaatggcgccgatatcctcaccttcgtccagcctgaatgcgctgaacgcatgatgttcgggttcggtcaatggcatatcggccacaatcacagtgatattgtcggttccgcccgcatcaagagcggccgccaccaaggcgtccacggcctcctgcggactggaatgcgccgcggcgatggccgcgatctgttcgtccggcacctcgccatgcaatccatccgaacagatgatgaagcggccggtcagatcggcgacatatacgtcgggcatgatgccatccggatcacccagacattgtgtgatgatgttgcgtggaatggtcgcctccgcctcttccggcaacatctgcccggaatcgatggcttcttggcgctgggaatggtctcgcgtgatgcgggtcagcgaagcggcgtcccacacgggaatgatatccgtggcgggagcatcggcatgcgccaacggactgagatggtaggtgcgggaatcgccgacattgaccacataggtctggtccgagaagtcctgatcatcggcgtcactgaacaaagcagcgctgcgggcgctggtggaatccgcatgatcttggggcagtaccaaaccggagcaggttgtgccggccacgccgccaaggcggtctcccagatcgagaatgtcgtgctgggcccgtgccaaggtgtcgtcgatatcctgacgggtgcgtgaaggcatggcggccaattgtgcgaaatgctgggcagccaactggcttgcctgctcgccgcctttgccgccgcccatgccgtcacagaccatgaacacgccttgttgcgcgaatccggtgtcttggttgtttttgcgcctaagacccacgtcactggtcatcgcgatacggatggagcctgtggtcatgacgccttccccttcttacgcgtgcgcttgacatgcgtcgtgtgcggctttgctgcgtgcccatttgacagtatagccacgcttttcagggaaagtcgtgtacgtatcctcctgaaacgcggcaaagaagcgagcattgccttgcgtaattggtcgactcctgtccaatatgtggtggcttggcccgattcaatgtcttgccccgagaacgtggcgtagtcggcttcccggccaagctggatcaaagcctggtcatctgtgccgagttgacgggcgatggcaccggcctgatctcgacgagtgcccttggctgtgatgccgctttgctcggcaagcatgcgtatggcattccaacctgctgccacacgggttttcggactgccgtgtcgccgcgctcgtgccagcagtatggccttgaacatcagaatcagaccgcaggcgatgagtagggtccacaatgggctgccgtacagggccaccttgcgggtcactcgccagaaccgcgcccagaacaggttggtcggcgaatcatcggcgtcggcgccggccaatgagctttggcccttggcttgcgtctgatcgcgcagcggatcggtcaacggcactggtggttgccggaccagcgtctgcggattcggcggcgtcaggttctggttttcatcaggcatcttggtctccttgggcgtcggatagaacgccacccatcccaggccctgcaatttgatttccacccaagcggtgacatcgttgccggtgaattcgattttggtgccattgcccgaggtcttctccgtgcgggcatcggtgatttcgccatcctcgtttttcggcaggaagcccaggaccacacgggagggcagtcccagatcacgagccatcagtgccatggcggaggcatattgctcggagtcgcccaccatggccgtgcctgccagcagcttgttgatgcggtagttgccatggccggcatcggagggatagtcgccttcaagtccatgagagaaccatccggagtctttcaatgtgtcggccaacgccgtggctgcggcaccgcccgaggactgcccgccggcaatggacgtggccagtttgctggccgaatcgggaacatcctgggcttctggttgggtgatgcgggccgcagccgcactgctgatctgcttatcggtgggattacgggcgataatgccggattcggtataggtgaggcctttacgcgtgccggcgggaataatggcggaatcggtatccgtgttgtagtaaaacgtgtcattgccgttgtcggcatcgttggcgaagctcacgccagtggccgctcccgccagcggcagccaggtgtcggtcagttcctgatcgacggtgaaggtcgcagtgaaggatttaccctgctcatccgccttgatcgtggtgcccacgcgatgataattcgaggagtccgtggcttcggaagaatcggacaggttccatactgtgccatcgaatcgatccatcaccgcaagtttgaccggtgttccggccggcagattatgaacggtcagcaacacgtcttttttgtggtccttgatataggatcgcatgccgctgagcgggctggtgtaatcgtaggggcttaacggcggatcgtagcggtcacgcagcacgaaacggtcctgtggcaccagcaacgtgcccccgaaagcaaggccggcagcgagcacgacgatgatcagcgcggatatccagcgcccccattccagcagttcaagacgccaagacagccagataatcagcagcaaggcaaaggcaataccgcagatggcgcgttgccagccgctgtctgtgcccagcagggcacatacggccacggccgccgcaaggggcagcactcccaccagagacaaccatgcgttggcattaatggcaaacacgccggtgaagaacgtaagccacaggccgatggtccataccgccatcagcacgccgtcttgcgtgcccagaggcggatcgacggaaataatgtacttgaacgagccaaacgtcatttcccaacctgaactcaaggtcttcaaggtgggaatcacgtaatgggacgtagtggaactcagcgttaccaccgggccgatgatgaattgggcaaacgccagaaacacgatttgccaccacagtcgcaacgccggcaacatgcccgccagagcgatgatcgcgcccagcaaggtggccggtacagcggcaatcgcccaagtggccacgccgccgtacacgtcgatgagattggcttgcgccagcaacatcatcgccgctatgagtacgaggctggcgattcgtttgccccacggctggcgactgaggcccatgccgcgaagcacattgcctctggtcatccagataaccgaatgtgtggagtcggcccaggagccggtggtggtggaggtcccggtgtacgtgccggaggaagtgccggtgtatgtgccgctcgatccggcgtacgcagcggtattggtattggtgatactggactggtcgaaggtcatgcgagcacccccatgatcagcgggagatcatcgaggtcgccgatggtggccaatgtgaagttggcgaatcttctgatgccgcgattggcgccggcgctggcctgcaataccatgcagctggccgatcggggcaaggccaaggtcatgcgcttgatctgctcgatgtctttcagcgatccaacagtgaaaaaatagaacgaagcatcaggactgtgcttcagcgtgccctcggcgagattcggattatcctcacgatcaggctctatggcactggcgttgtcgaggaactccatggcgttgcgcggctggccgtgcgcgttgcccgcgtggcagaacaatggacgatcctgcagcaggcatttgacgccgatggaggagtggatggacaccgccatctcgaattcctcgccgttgacgtattcgtccgggttcacgctgatggtcaccgaggtgtcggtgcggcgcgtggcctcatattggcgaatcatcaacgtgccggttttcgcggagctcagccagtggacgttacgcacgtcgtcgcccggctcgtattcgcgcaatccgtagaagtcgagatcatcatccacgatctggccggatggttggccttccaggtcgcggggcacgccggcattcagagtatcgagacgcacggtacgagggtggatgaatacggtgatgcggtcggccagctccttttcgtgacgcaccagaccgaacgggtctcccttgcggatgcgcaatgggccgatgggcagtattgcgcgcgatacggtacggaactccacatcggtttgcttggattgcccgggagccagcatggggatgttgaatcgttcatgcgcatcgccgattggcagatatccgcgtgccgtggtcgtcggcgttctgccggtgttgtcgatgccgacgataacggatacggtgtctcccacggtcacgcgatgattggatacgacgatggacgcgtggaagcgtgtgttgccgagggaaagcacgattgccgcgagcatcatcaccatcgccacgatgccgaatacgagcagctcataccagcccagaaacgggaacgcaataaggcatgcgatgcctgcgcccgttaccgcccagcccaagggcgagacgtaggatgcgaagaaccgtctgatgcgtcttaccgcgcgcttgaacatgcgttcagcgcgccggcgacggcgtaatgcggcggatgtagatgccatggtcggatacctttccgggccctatcaggaaccgatggtgggggagggaacgtcttcgagcacctgtgcgatcaggctttccggagtcgcgccatcgaaggtggcttccggagtcagcgtgatacggtgtgcgagcacggccactgcaaggtccttgacgtcatccggcaccacgtaggcacggccatcggccgcggcccagatacgggcgcatcgggtcagtgccaaagcgccacgcatggaggagccgaccgtgatcttctcgttgtggcgggtcgcctcgacgagcctgacgatgtattcacgaatcgcatcatccacatagatttcggtggccacctgacgcagccgcatgacatcgtcaccgctcagcaccggggaaatggtctgcgcacggtcggtgatatcgacctgcttgaggatatcgacggacacatcatggcccgggtagccgattgacgtcttgataaggaatcggtccatctgcgcctcaggcagcttataggtaccgagctgctcgatggggttctgggttgcaatcacgataaacggctgcggcacatcatgggtgacgccgtcaacggtgactttctgctcttccataacctccagaagtgcggactgcgtcttcggcgatgcacggttgatctcatcggccagcacgatggaggcgaaaatcgggccttcacggaactcgaattctccgcgcttctgatcgtagaaagtcacacccaccacatccgaaggcagcagatcgggcgtgaactgaacacgcttgaaaccggtggaaatggaattggccaagcctcgggccaactgggtcttaccggtgccggggttgtcttcaagcagaatatggccgccgaccatcagtgcagtgacgcattgcttgatagggatggtcttgccgataaccaccttggagacattctcgaccagcgcattgaaggactgctggaaatcccggacctgagccgtgggctggggcagtagtccggaattgatgctggcgggcagtgccgatgcggctgcttgcgcggctttgctcgactgacgctgcggctgggattgtggctgtgattgcgcggtgacctgctgcgggatggctggcgtcgatcccttgcgcggcttgagcacggtgctgtcatcgcccgcagggatggaggcggcgtcagtggtaggagacggcttttctgacggcgcttgtgacggccgctgcggcaggttaggcagcgcaacggactgcggcgccgactcggtgcttggggtcgtgccggtgtgtggtgcggatgccaggtgcgtggcgtcggatagctgcgtgctgtcggacagacgggtcgtgtcagacaactgcgtcgcgtcatcgatgttctcgctcatggatgttctcctactgcttgtgaatggtggttgacgatattggggtattgccgaaaccaagaatccaggggttcttggccaaagtggtgacatcggtaccggatttgagcgacttggtcccctccgaggagtcagagggacgtgtgcccgcgacgctgcctccgtccgcagtgttgtcgagaccggagtatcccggcccgccggtgattttgacgctccacgcgtagttgccatcggcggccacggccaagtcggtgacatccaatggctggccggagttccacgtgaacggttggccattgatgatgatttgtacagtggccgacttgccatagacatcaaccgaaccgccggtgacgttaatgacgtgagcgttgtctgaccagcgcagctcctgcggtttgttgattacagccttcttctcataggtgtaaggagcgccattgtgcgggcctccggtggcggcgtcgctggtagcgccgttgaacacctgttgcaccgatgcggtgttgcatttggcccaaggacccattcggaagtcgagtgagttccggttagtagctgtaccggaatcgatgccatcggcagtcacgctgtaggactgcgcatgtccctgcttggtccaatgcacggtgcatgtactgccggatccggtggtgtagacgtcagcgggcggctggaccttgtactgcgggacaaagcggctctcgcccgtgccggcggaagcatcgcgctgcggcaccacggtggctgttacggtgatttcccgggtgttcaaatcgttctcattgatctcgaacgtagtgccactgtcactgcaatcgatggtgtccttgacgtctcctcccaaggaaattcgccggcagccggcattgcggttgttgccgagagtgactttcgccgttaccgtggtgtcgtcgttcgacaacgcaatgttcggcgcatccgggtctccccagatcttctctgacggcgatgcggcggactcggcactccaattgattttgttatgggctttgacggtcgccgtaatggcggtgccatcggaaatgtcgttgttgttgaacgtaaacgacagctcggtggccgtattgccggtttccttggtctgcggagcacctgcaccggtgacggtcactgaatagttgtcgacggcgctgaaatcaccgctcggcgctttccacgtcactttggcggttttattgccacctgtgaccgtaacatcggtgggagcggacggcaccttgtccggtgtggcttcgacggcggtggacggtttggaccaaccgacgtcatttcgcgcggcgacggtgaaggaataggttttgccgttcttcagacccgtgacctggcatgaggtgacggcaccgcaatccttctctccggtggcggcgccggtccaactgaccttgtagttggtgatcgggctgccattggcggcaccgggcgtccatgtgaggctgaccgcgctgtcctgcggttccccggctacgggggagagcagtggcggctcgggcttgtcgatcacggacacggtaatcgatgcggtgacttcacgatccttggacttgctgccgtcttgcacggtgacgagcacggtgttcgtggaagcacccggatcggatgcgacggcgatggtgacgtttccggaggcatcgcatccggcgatagtgagtttggcggcgtcatccgccttgcagctgatgacggtcagcgaggaatcggggaacggattgtacgcgccggtaagcacgttcacggcatcgctggcaccggccttgatcttcagcgtcttgtcgccgacgcgtgccagcggacgggtggaagacactacgcgcacggtcacaccggcattcacggtgcccgcgccgtatgcgatttgcacgggaatggacgcggtggtgccaggagcggcatccttggtggcggaaacctgcaagctgccggaacgggacaggttagcggtgattcgcccggacgatgagcttccgccggaatacgtgtattgcttctcgtcgtcatacacgccggacggtgcatgggtgagcgccgtcagatcaacggtcttggggtccgcgcccgcctcgacatcaatagtggaggacgagaacgtgggcggcggcacatcgcggcctatcaccgtgatctggagagtgatcactgcggaattgataatcttggtcttatccgatccctgcttgccatccacagcggtaaaggtaatggaggcggggcctgcgtagtcttttgccgcagtgaacttcagggtcttgtcgttcacgtagaaatcggagttggaagccttggtggcgctgacggaatcagcgctttcgatatacggttccttgccggcaccgacgcgaacatagtcattgatgttgatttcaatggtctcacgcgaattgaccttcaattccggtgccttgggacgcaacgtgggcggaaagacaccataggccggtacctggatgaacgcggtggaggtgatgttgtatttcgtattggtcaccgtgtaaggcacggctcgcgcctgtgacgtcaggtcgacggtgatggtggtcgaatgctcaccgcccttgacgtgagcgtgagcgctggcggagggatgcacgccgaccttgagctcattggctgtgccggaaggattggcgatccactgggaaacatccacatccacggacttcttatcgatggtggcggcggacggcacacgatagtcgtaggcggtaggcggctcgatggcggcattcggatccacgtttaccgtgagggtggccgtatcggacaagccggccttgtctttgaccgtgtaggcgatataggcggtggtggcgctgccgggcgtggtgaaggagatcatgttgtctttcacgctcaccccgtcgagaccttggacctcgacatgcttgtcgacggtcagattggtgttgtcgccggagatgtcgttctgcgcgaccggcacggttgcggccgtattgggcctcaacgtgatttcgtcatctctggcgtatacgccggagtcggacgatccttggaatacgcccacgcggatctgcgcctgtgcgcgctgaccggtccaatcctccacggcataggagaaggtgtcggtgccggacgaatccggatacgcttcatagaccaagtagtcggaaccgacttcggatatgcggcccagcgtgggtgccttgttgcccagacccaacagctgatcgtcgtcgccatccgtgtctatgccggtcagtgtgatggggatgcggaccttctgcccggcggcaacctgcgcttcggcgtcatgcggggttggcgcggccttgctcgctgcgtcgctcttatgcacggtaatggtgatattggcggaagccacattacccagattgtcttcaaccgtataggtgatggggaagttgccggtctcgctggatgcttggtagcggaccgtgtctccagagacgaaggccagacccttgaacgtccccttgtcgtattgcaggttgttcttgagtttgaccgtggtgccatccgagtaggccacatggtcaagcacatccacggacacgatgccgtcggtacgcacctgggcattgatattgctggccttgggcactgaattcgaggtggccagagccggcggctgcaacacgatggtgcccttggcggttccggaggcgttggccacggtgtaggtaagggcgacgggcttcgtgggcacctgacgcgcggtgatatacacgcgcttatggctgacgagaccaaccttgatgccggagtcggccggtgcgctcaccgtggtgacggacagcacaccgcccatcggatcgacgtcattggtgagcggctccacaatggcggtattatccgcgccaagcagggcgacatcgttggcggcaaccggtttggcggcctcgccggtggcaggctgcacctcgactcgagccaatccggtggccggaatcgaaccttgagtaatgatgtagggcacataataggtgccgggattggtggccttgaacgtcaacgacatatccgccgcattggtggtcgtcgaagcgccgttgggcgtatccacctgagtcagttgtgccggctgcaaggaagtgccatgcacataagaggacagcttgacgacggtatccgtgttgggaacggtggttttcgctaccgggtcgatgaccgcggccaaggtgttcgcgggcttgaccgagaaatacaccatgccggtgccggttgccgtgccgtcggagacggtgacctcgacgcccacacgtcccgacgccagcgcaccggtgttgaacgtaagctggccgtcggctcgggtggacacctgcacctggtcggtgttctgggccacagcggagaccagagtgagcgggtctccatccggatcgttgaagctgctcagcgcattggcggtataactggctccctgctccacatcgatctcgggaggagtgtcgaactgtacgggagcgtggttgcctccatcattcagggttacggtcaccgtggcggaagaggtctggccgcgaccatcggaaatatcgtaagtaaaggtaacggtgcctgcggatgcggcggaggcatcgagttgcagataccggccgtcgtaaatcggcgaaatggtgacgtctttgttgtttggtgcgccaaccttggtgattttcagtacggaacaatcggtctgctcgtcattgcgcagcgcgtcgagaatctgttccgaaccggctcgtgcgccgatttcatcatcctcggctttgatttggccggattgtgcggaacaggtcttggagaagtcgtggtggttgttggccgagtcgttgttctgctgttctttctcggtctgctcggtctgtattttgttccactgtattttgatgactttggtggaatcctcagggttccacacattgccgttaaccgtgtcgttgagcaccacaaggcgatggttggtgcggaacaccaattcggaagtagtattgacggattcgagggtttgcggcttgacgctggtatccgtgggggagcaggcgcgaatgtagttgctggccttctggctccaagccgagtacacgcagcccttggacgataccggtcgtgctggattcgccttgcccccgttggctatgaaattcgccttggcattggacttcaacgggataagcgcaaggcctctcggtgatgccgcggccacccaatcggactgtatgtcatcggtgggaggctcctgaagggtgagggtgccggtcgtgtcgacatcgacgcggccgcccttgaatatgacggttttgccggttgcgattaccggcgtgctcccgatgacggtaaagctttcaacggtctgctgcttgccgtcggtcagcgattcgagggttttggccttggcgctgctgggattgtcaagacgcagcaccataccgtcggatggacggtatccgtagaccttgccatcgtgggttactgcgatgcgcccgccctcgcccagctttattttcggatcggaagtggtgggggtcacggaatcaaggttttccgacaagccggtccacacattgccggtcttctcgttgatcagggctgcggtatccccgccgaccacagtggtggtgttggctttgatgtcggtcttgacaccggtgctgaccgtggatgccttgatggtggaggctttggtcgtttcggtcaggatggtgtcgccattatgctgtgcgatgtcgaatcgtggggcggaggaggagacgccggcgtcggcctccttgttctttacgttgaatcgtgcggccttctggtttttcagcgaagtgacccatacggtgccatcgtccagttgcacatggcggcgcgtgacggtgctcatgatcaccgcgccggcaacaagtcccagaagcagcaggagcgtgattacgggaaccgtccacgtatgcccttcggagggcataaggcggcgcaaagccgcgctgatgcgtcggcgacgatcgtatgactgggacgatgtggccatctgaactccctgacccctgttttctctggttgctggtgtaatgacaacgctttacggttccgatacctgccgttcctgttgtccatttggtgaattcgccgctgctgggcgcacgtctgatgcgatacgcaatgccaaggtggcatgcccggcagtggcgagcggatcattcttgcggcttggccgcacaggcgatggcggggctgacggacatctggcggttcttgcgcacaatggacacctgaatgcaggtctgcgagccttcctgcgcgttgacggtcaccgtgggatctgacgttgtgacggtttgcgcgctctggtcggtattgctgccctgcactatggcccacgcataggtatcaccgctttgcgggtctggattcgtccaggtgaacgtcacggatgacccatccgccgcataggtgccgttcagattctccggggaaggaatctgggcgttcgcggtatcggtgatcacgtcatcctgattattgcggttgttgtcatcatccttggtgccgggcgtcgccacctgtttggtatctgatccggtggcgctgtccatgcggggaacgaccacgaaggcgaatatcagtgccgctgcggtgatcgccgcaagtataccgacggtaatacccaccggtttgacccatcgccgtgacgaacgggtgatctgatctcgctggtccgtggcccggcgccgacgctcgatgtctttgggataggccggcatcccttccacggtaacgggagtggcatgcccgaaatatgcgaattgcacacgctgcatggcacgtgcgaactccaacgcggagtagtaccgctggtcggggtccttgttcagggctcggcgcagcaccgcttccacatcggccggcacgtcggggcggttgaggcgaggcaatggctggttgacgatcagcgaaatcagttccgattgcgaacgcgggtgataatcgtgctggaatggcgagcagccgacgaacatggcgtacagggtggccgccagtgaatagatgtcggcggcttccgaaccattggtcagatgctgaagcacctcaggcggtgcccacggcggcgagaatccggtttcggtacggtcatacacatcggtggagataccgaaatcacccagaacaggcaagccctgcgaggtgatgagaatgttgctgggcttgatgtcgtgatggatgatattgctgcgatgcgcggtgaacagcgcgcttgacagcttgatgccgaggtcgagtacctgctcgcaggtcatggaccgggccttcatgatgctgttgtaggtgccgcccggcgcatattcgatgacgatgtagccatggccatcggaggtgacgccggcaccatataccggcagaatgtacgggtgggatgacagcttggccatgaagttggcctcgcggttgaacaggacagcggcccgtgggtcaagggttttggcgctggcctttaccgccaccgggcgtgcgggcatacgctggttatataggtacaccgtggcggtggcaccgcttcccaacatctggacgaaatcatatccgggcagcttcggcggcctcatcggaatatagtccatctgtcccctccctccttggaaaatgcactctccctgcattcgttctacaggataccgtcaagggtacgattcttcgtcgggttcggtaaaatttttccctctgtgacggtcgggtttaggctggagccatgatgacgagacttgaacctggaacagtgctggacggcatcgaccgtgatggagcggcgaggctgattgtcggcacgcctggaagcggcaaaactgaattcgccttatcggtgttgatggcggggctgcgccgctacggtggcacgcaggcggtgatggccgtatccggccgtgtggccgccgacgcattgggcaatcgggtgattcgtgagctcgggttttccgtgcaggccaggccggtcaccacgctgggtgccgtggcattccgggccatatcagcttcgcgcgagggaactggattgccgtcgcctcgattgctgaacggtgcggaacaggatgctttgctgcgtcaagtcatggccgtgcatctgcgccatgccgtagcgggagatgattgcggcacctgtgatttgctacgcgtctactttgcccaggatgactgggcgaaactcatacgcgatgccggtgccggcgagatgcccggctctgccgcttccgcacaatcaagcctcccgcaacaagggtcggattcgccgtctccgacgtcggcaggcggctcgaccagcgcggataggttcacgcgaggtatttcagatgcgtttatcagccagttgcgcgatatgctggcccgattggacgagctcggtgtaggcgttcacgaagagccacgtcttttggacgccgtgacggaggacgcgcgattgtcggtgcaatggcgtttggctttcgcgttgcgccgcgaatatattgcagcccaaagcgcggtatatccggggcaataccgtttggatgcctcgtatttgctggtggcaggcgctcgtgtggtgcgtgaggcattcgccgccgatcacgcggatgattccggccggcctatgcgtatggaggcgttgggcttgccccggctgctggttgtggatgatgttcaagacaccacgctggccggtatgcgcttcttggaggagttggggaatgccggcgtcaagttggtgctggtcggcaacccggatgaatcggtgcagaccttccgcggatcgtatccggaatatctgatgcgccgtgccgtggaagggcggctgaaggccaaggaagaacagctggttggcggcagtgccgtcgctgatcagtcgcacatgacgatggctgatgtgatcgcgtctcgtatttcgctgtcgattccctcgccggaagacgagccgctgcctccggccgagcgtcccggcaagctgaccgccatactgggcggagtcgatgcagcgaattatcaggcggacggcacggtgaccgccggcctgtaccgatcctcacgtgaggagctggatgatgtggtctggcgcatcaagcgggcgcatcttgaccggcatattcggtggaacgacatggcggtcatcacccacgacaatgccgccgtgcggctgttcggcgaacgactgcgccgagatggtgtaccggtgcggtattcgtcggtcacccgtcctttgaaggacgagactttcgtgcagggattgttcgcgcttgtggagcttgcccgattgcgtgccgaggggatggcggaatgccagatgacgttggcttcctgcgcggcatatataaggactagagtggccacgttgatgaacggcccgttggtgagtgccggggccaaacccggtcaggggcgtcccgcaaagcttgcgccgatcgaatcggccatggggtcgttggagtcgctggcgcatctcgccacggatgatgccatgctgacctctctgacgacggcatgggaaacattgcgtgaaacataccatgaaacacggtgtgaaacaggtcgtgaaacatcctcgtcagtggtttcgacgtcagcggtttcgtcgtcagtgacttcgttgccagtgtctgtcgaaatactcggtgaaccgtccggcgatgacttggcctttggcgttgacgcgctgtacgtgatgcttgccattgatgatgccgccgcgccggcgcaggctgcgctcgcatccatccacgcggtgctcggcaacgaccctcaggcccgcgcttttgcgaacctgtggcatctggtgggcagcgttgcttccggcttggagcggctgccggcaagccagcgcgtacagccgcgctatgcgctgtctgttgcgtggaacgccaccggtctggcaccggtctggcagcgtgcggcattattcaacacggcagaggggcgtacggccaatgaccggctggacgcggcaatgcgcctgttccagttcgccgatgattccaccgccagtcgagacatcacgtcattcatggcacaggttcggggcatggaagtgcaggccgattccttggcccacataggaccggtggaagacgcggtgacattgactacgccggcaggcgcggccggacgccactgggaatatgcgtggataccggtggtccagcaagacgtgtggccgaacctcgccgggcgcaacaccatgttcggtggtgaagaccttgccgagctcgtgctgaggggagcgcttgaagaaagcgacaaaaccgggcatgatccgcggttcgcggctgtattgtcgggcgagaagaagagtttcctggtcgcgctgacccgtgcacggcgaatcatgatcagcgcggtatggaacgacagcatgagcccctcggactttctcttcgggtatctgccggaatactatccgcgcaaccggcaacaggcgcctttcaccacagtgggggcacatgcgggattcgccgaatatgatctggccggattggacgccgacccacgtgggttggtcagcgccgcccgcgcggttctggccactgctcaaccgcagcaggctgccgcaaaggacgccgcgattgcgttgacactcctgttagagcatggtgtgcgcgccgcaaatccgcagagctgggcgtttgtggaatcgccggcccaatcggatagcgcgtcatctggcggtgcgtcatctggcggtgcgtcatctggcgatacctcatctgacagtgcctcatccgacagcgcgtcatctggtggtgtacagcctgacggtatccaaacagggaaaggcaagacggatgcgcaggccgcgcccatggtcaccttatctccatcggcggtcgacagcctatgggcgtgcccggtgtgctggatgctggagaaccggttcgccggtcctcgccccagctccgtggccaccagtttcggaaccctcatccatgcggttgcgcagcaaggcagcgaggaagggctggaccatctttcccacaatgcccaggcgttggccgcactgggcttggactccacggccggcgcggaacgtcgcatcgaggctgtctcggcacggcttaatgccatctatcagagcaaacgtcctgatccgaatgccatagccgacacccggaaccgctatgaggccacccgtaaggacgagtccgcggcggataccctgcgcaacatcgccgattactttgtgcgcagcgacgccgatccggaaacgtatcttggcaagaactccagcaacttcagcattggcgcattggccggtgccgaatgcgaacgggagtttgccgcacgattcgatgtgcgtgacatactcgacgcatacaatgccgtgcccggcctgcacccaatcggtcggaacacgctggtccgtctgatgggagcactggtcggagggtggccggaaggcatggacgagcatctgaccgtgagactgtccgggcgcatcgaccgtatggaaacccgcgtactcgcagacggcggcgaatgcattcgcctcattgactacaaaacaggcagaacgcccacggtcaaacagattttcaatgatttgcagctcgtgtgctatcagcttggcctcgtgttccccgaagacgggccgcgcggtgccaaggcacttgccgcaatgccgcatatcagccaaagcgtgctattccatgtcgggcagaatgcggcaccagccagaagctacgctccggaaggtgccttccagccgccgctgttcactgatggctcgttgaatgccgaaccgttcacgccccgatactggtataaagaccccaaccgtttcttcgacatacccgccatagatccggctactcctcccgaaggtgtgagtgccgaagcgtgggcgcaattcgccgcgctcgccggtacgcagacgttatggtcgctgaccatgatcgcccgcgtattctatgccgcggcggccagcagatcagccatcatcgaggcccatccgcaagacacccatatcggattctgccgtatgaagaacgtctgccctgcctgtgcaggccagatcgacacgattttcgaaacgaggcaagcatgagcacgttcactcccagtgcggaacaggccgccatcatcgatgcgccagtcgatgctgacgtattggtggttgccggtgccggttccggcaaaacctttacgatgacccaacgcatcatcgcgcttatcaatcgaggtgtggcacctgaacgcatccttggcctgaccttcacacgcaaggccgcaggcgaactgctggaacgcgtctccgccgcagtggccggtgatatggcgggctctacgaccgccacggtgtctgatcgggcattcctcaagccggccattttcacgtatgacgccttcttccagaccatcgtgcgccaatatggactgcttgtcggattcgatcagaacacgcaaccattgagcgcagccggagcgcttcaactggccaccgaagtcatcgacagtcacatggatctggcgttcagtgaggattttggcgccttctccagtttggcgaaccgtgttctggcgttgtcggatgccattggcagtgccatgatcggtgccggctgcaccagcttcgatgatgcgatcaatcgagtacggcaatgggattcggcattcatcaatcgattgcaacaagccgttgcagacgaacccatgcccgaggacgagccgaaaatccccaagatcaaacgactgaagaaagataccgacgccagctggcaagccaagctcgatgaccgtgccgaacatttgcacgcccgctgcacctatcattgcggtgcgctgctggagaccacacgcaaacgcgatattctgctccagctggtggaggcctatgcccaagccaagcgggaacgcaatatggccgaattctccgacttcaccattgccgcgtatcagcttatcgagcgcttcccctccatcggagagcgtacgcgccgcaggtacagccacgtgctgctcgacgaatatcaggacacctccaccacgcaggccgctctgctggcagcactgttccacgtggatgcgtcacagaggtccgccgtcaacgcggtgggtgatccgttccagtcgatttacgcatggcgtggtgccagccctggtgcattccgtatgttccagcaagatttccacctgtctgccggatacaagccattcccgctgtccgtcaccaggcgaaacagccgtatagtgctcgaagccgccaataatctcacgctgccgttgcgctccaatccgtcgcgtccttccagctcattgatgcgtgaggtcgatgtctcatcgctcgaccccatgcctgatgcccccgaaggaacattgggagtactgggcttcgccacggccgggcaggagatcgacgccgtagtgcgtttctgcaagacggccatcgcacggcaccgttccgcagccgaacaacaggaacagatgccgggcgaacagaaagcgccggtcgccgtgctgtttcggtccaaatcacatatgcccgaatatcaggcggcattggaacaggccggattgaccacattcgtggtcggctattccgcgctgttggaacgtccggaaatccgcgatctgatggcgttgctgcacgtggccgccgaccacaccgatacgggatcgctgatgcgcttgctggccacgccacgattcaccatgtccgcagcggatttgaccatgttggcccgttttgctgaagaacagaacacggaacaacgcttccaagcattggtgcaggccggccttgcccaaccggatacaccagcgaatgaatgggcggctgtggtgcgtgagtaccgcgatcaggtggccaatgcggtattcctgccagacgtattgctacgcggcgacctggtaaaactgcttgaacggttgagcgcacacgggcgcaacgccataacccgggccgcggtgatgctccgtcaggtgcatgatgccgtcgggcggccactgggcgacgtgattcgcgccggcatagaagcgttggatcttgacatcgacaccgtattggccggtgtgctgcataatccgcagcaccgcgccaatcccgctttggcgcatatgcctatggatgcgattgtggatttggtggatacgtacacgcaagagattgccgctgagcaaactccctcgttgcatgggttcatcacatgggtggatcatctggcttcggtggaggatgaagccgccagtctccctgacgctccggtggatgtggaactgatgaccgtacaccagtccaaagggttggaatgggatgccgttgcggtagtggggcttaccgccgtcggattccccagcaatcagggcgaccatctcaagatcgtgctggacgagcaccatacgggaggcaccgagcaaggtcactggaccgcacccgaatatcatgagaccgccgactcctggctcaccaaccccaccgccgtacccgtgcctatgcgtgccgatgccggcattctgccgcgattcccccatgatgccgatgtggaagccgaccccatcgcatcgttggcggctttggatgatgtggagcttattgatgatgaagtgttcggctccatgcgcgaattcggcgatggcgtggaagaagtggatgcatccggctggtatttgacgcaggcggaggaatatgggcgccggctgcatgccgacgaacgtcgattgatgtatgtggcgcttacccgtgcgcgagaagatgccctgatgacctattgcgcctatacgggcgaatccgggcgggacccgtcagtggtgcccaaaggctctcgcgccgctcagccatccaatttctggcttgaagtgcatgacgcgctccaagcccgtgaacatgcgatatcggctcaggactgtgtggaacggctgcaagccgccaatgccgggaagcctatgctgatctcggcgcaaggcgaagcgattgccactcccgaagggttctttatcggagagcatgccgcggcatacggtgacgccgtggtgggggaggcatggcagacgccgattacgcagacggatgccgctgtcgaattgccgtggccggctaccctcagcgacgcagtgcatgaacagctgtcacgtggcatcgatgttatcgccgcagattcctcgtcacttgagcagcaccaagacgccggtccactgctgcaacgggcgcaattgctggtggacgacgccgatttgatggccgatgccgccagcggccagtcgcttgatgaggcagtcaaagccaaggcgcaacgcattctggccgtcggacgtcagaacgtgacaagcctgcaagcccgcgtaggtggcatgagcgaacgggaggagcgcctctactggcgtagcattatccgtccgattccacgaatatcgtctccggcggccgaagccggcacgcagttccatgcgtgggctgagcaattcatcaatgccggtaagccggatgaagcggtactggcatatgaagccgaatcaagtatgccgcatacaggtcaggatgcgggattcgtttcccgggaagccatgttggccgatttggccgaacgggagcggcaatgccgcaagccatccacacggcagcccgctgtcccacagcccacggctcaacaatccgcatccgccgtatccgccgcctccgccacttccataagtagcgacaatgccaccgagtccaagctggtggcgtggcagcgcagactggccgaatcatcgtgggccaagcgcatcccggcgtggacggagcgtgccattgtcgtggacgtgccgggcgtgggcctagtcaatggtaaactcgatgcggtattcatcggtggacttgacctgtccagcaccaccgcacgctttaccgtggtcgactggaaaaccggtcgtcggcccaccaagccagacgacatcacccgcaaacttgcccagctcgacatgtaccgactgctgctggcagcggtcgaaggtgtggaattggacagtatcgacgccactctctactatgtcagtgagcccgacgagggcttgcgcgagcttcacgcccgtgcgaaaaccaaacaggaaatccttaccgagttgagctccggcattcccgaacaatctgacaacgactgagcccaaaggctcatgacctgtacagcatcggacggccttcaccggtggagagaccttatgcatcgcaaggcatctccgacgatgaggacgactggccacgtaccggtccgcggttgaaacgcaccgcgtgacgttgctggggaaccgctaccctcggatggcacgtgtgggcgggcgcacgtgccggacaacgcaccagtaaggagttattgtgtccacgactcgcgcggtttcgaagtcgtccgctgcccactcgccctatcagcgcctgttcatgctgcccggagccaaggcgttctgcctgtccggtgcggtggcacgattgccgatttccatgatgagtctcggcatcgttctggcgctcaaccatctctacgacaattggaccatcgccggcaccatgagcgccgcctatgtgctggccatgagctgcgtcaccccgttctacgcccgcgccttcgaccgtttcggccaagcccgcgtgggccggcttgcgctcgccgtgcagatcgtggccatgctcgccttcgccttcgcggcgttggtgcgcgtgccgattccgctgctgttcgccctggccatcatcatgggtctgacgcagttctcattcggcgcattggtccgaacccgttggtcctatgcgttgcgcggtgtggaagatggcgaacagctgctcaacacggcctacgccatggaagccgccattgacgagatcgtctttattctggggccgattctggcggcttggctggccacctccgtgcatccggtatcccaactgttcgtgcccaccgtggcatgcggcatcggcggcaccatattcttctcgctgaaatccacccagccgccggtcatcgtggaacaggtcagcgtggccgcgcacgatgacggcagccccgctgcaagcgaagatgccgaccagctgaccctgcgccaactcaaacgcagcggtgccaagcccaagagtgtattgctctatgccggcgtactgccgttgctcgccgtgttcatcgtgttcaatatgagcttcacgtccttcgacgtgtccattaccgccaccatgaaatccatgggacttgagcccttcctcggtctgcaattggcgatgttcgcggtcggctcgtgcatcggcgcgctggtgttcggctcttgccaactcaaaggctcccattgggcgcatatggtgatgttcctgtcgctgctgaccgtcggctacgtgttcttccggttgtcaatggacaatctcatcctgctgggcgtcttcgaaatcctcgccggcctgaccgtctcgccgacgttcgccaccggcaacctcatcgtcaaggatctggtgccggcggaatccctgaccgaaggactgagctgggtaaccaccgcaggcacggtcggcacgtcgatcggctcgtccgcggccggcattgtgcttgacgcctccaaccctcatgtgggcatgatgctgccattcatcttcacgctggcgtccgtgccattggcgttggccggatgggccttggccaagcggcgtgggtgaaacgggatcgggctacgcccgatggatggttggcggcctcgccggggtctctccctcatcagagggagctggacttcacggttcggctcgtcagagggagcttgattctgtggacggggtattggcgtgagggcttggcggtgataggctgattgccgattggaaaacgtcccgggtacattgccgggcaggtacgggtagacagggaagaagacatgatcaaggtttcggtggtcggagcaaagggccgcatgggctcgcacgtggtcgaagcggtgaacaacgccgaggatacgcagctggcgctcgcattggatgccggcgacgacctgacccagatcaccaccgacaacaccgatgtggtcgtcgaattcaccgtgccgtccgtcagcctgaacaacgtgctgaccctgatcggccaaggcgtggacgtggtggtcggcaccaccggctggaccgacgagaaactcgcccaggtcaaatccgccatcgccaacggtccgaagcccgaaacccagaaggtcttcatcgcacctaacttcgcgatctccgccgtactggccgactactttgccaccaaggccgcgaaatacttcgaatccgccgaagtcatcgaactgcaccaccccaccaaggtggacgccccctccggcactgccatccacaccgcccacggcatcgccgaagcgcgcaaggccgcaggactcgcccccgtgccggacgccaccgaaaccgatggcggctcacgcggccaggtggtcgacggcatccacgtgcacgccgtgcgtctgcgcggcctcaacgcccacgaggaagtgctcttcggcaacgccggcgagcagctgaccattcgggccgacagcttcgaccgcaccagcttcatgcccggcgtcctgcttgccgtgcgcaagctcgccggcgacgctccggctggcctgaccatcggcctcgaccacttcctcgacctgtaatcgacccgcagtcgaccagtagttgcccccgcatttcaggcagggaagcgcgccgggacgcgcatcacggcattgccaccggctccggccataatgccacgcattcagcaacaatcaaggtacgtagtataagagtccacaatgggaagtacggtaaacactatgagcgagcatgacatgcaccttcttgattcagcacctttcggccgcattctgccggctatggtcaccccgatgaaatccgacggcagcgtcgatttcgccgccgcgcagaagctcgccaaatacctcgtcgccgatggcgcggatggtctggtggtcaatggcaccaccggcgaatcgcccgtcacccatatggatgagaaggtcgagctggtcagggccgtcaaggaagtcgtcgacgttccggtgatttccggcgccggctccaacgacaccgcacacaccgtgcgtatggtcgaacagactcaggaagcgggtgccgacgcggtgctcgtcgtcatgccttactattcccgcccctcgcaggacggtatcgtcggccactacaaggccgtcgacgaatccgccgaaaagccgatcatcgtctacgatgttcccggccgtaccggcttgaaggtcaaggtcggaacctacgaccgactggccgaacttgaacacgtcaaggctgtcaaggacgccaccggcgatcttgcagccgcagtggagaagcagcagcgcaccggcctcgcctggtattccggcgatgacggcctgttcctgccgttcctctccatcggtgccgtcggcatcatttcggtgattgcccacgtcgcctccaaccccatgcagcagcttgtccaggcattcgatcgcggcgatatcactaccgcccgtcgcctcgccaaccagctcgccccccttgtccacgcgttgaatggcgacggctatcaggccgtcatggccaaggctgcgctcaaggtcaagggcgttatcccctccaccaccatgcgtctgccgaacatcggtcccgacgccactcagcttgacaaggctgaagagggcatgcgcgctgccggactgctgtaagcccgaaacgctgcatacgggttgccagcccgccgcccctgcatgacagagcagaggcaccacaacagaaatcccaaaaaggttatggcacaagaacaaaagaaaacaagcaagaacacgaattctcgccgtcgcggttccgcgcgcggccgcaacgccaacggatccaacagccgtacgccgtcccgtaagatcaacgccacccggcaggccaccgcaccccagcaggatgccgtgctgatcgccccgccgaagtaccgcaagggctccatgcgcatcacgccgctcggcggcttgggtgaaatcggccgcaacatgaacgtgatcgaatacaacggtcacctgctgctcatcgactgcggcgtgctcttccccgaggaggagcagccgggcgtggatctcatcctgcccgatttcagctacatcaagaaccgtctcgacaaggtcgacgccctggtgctcacccacggccacgaggaccacatcggcggcgtgccctacctgctcaagctgcgcccggacatcccgctgatcggctccaagctgaccctcgccttcgtggacgccaagtgcaaggaacaccaccagaaccccaccaaggttgaggtttccggccgtgagaagctcaaggtgggccccttcgacctcgaattcgtcaacgtcacccactccatcccggacgccctggctgtctatgtcaagaccccggccggctccctgatcgacacgggcgatatcaagctcgaccagctgccgctcgaccaccgcatcaccgacctcgtcgaattcggcaagatcggcgaaaagggcgtggacctgctgatgatggactccaccaacgccgaggtgcccggcttcgttaagcccgagacctccatcggcccggcccttgaccaagcgttcgcccaggccacccgcaagatcatcgtcgccagcttctcctcccacgtgcaccgtgtgcagcaggtggtggacgccgcccacaagtacggccgcaaggtcgtgttcgtcggccgttcgatggtgcgcaacatgtccatcgccgccgacctcggctacctgcacatccccgaaggcaccgtcgtggacctgaagcaggccaacgacattcaggacgacaagctcgtcttcatgtgcaccggctcccagggcgaaccgatggccgcactcggccgcatcgccgacggcaaccaccgcgatatccacatcaacgagttcgacaccgtgattctcgccagctccctgattccaggcaatgagcacggcgtctacaaggtgatcaacaagctcgtgcagctcggtgccaaggtcgtcaaccgcgacaacgccgccgtgcacgtgtccggccactgcaacgagggcgagctgctgtacatgtacaacatcgtcaagcccaagtgcgccatgccgatccacggcgaaaaccgccatctggtggccaacggcctgatcgccgtcaagaccggcgtggacccgcagaacgtggttttggccgaagacggcgatgtggtcgacctgtaccacggcagggccgcggtcgtcggctccgtgccgtgtggttacgtgtacgtcgatggcgattccgtcggcgagctgaccgatgacgagctggaaaagcgccgcattctcggcaccgagggcttcgtctccgcgttcgtggtggtcgacaccgacaatcacgaggtcgtcaccggcccgaagatctacctgaatgccgtggccgaggacgaaagcgagttcgacaaggttcgtcaccagatcgtcgaacagctcaacgaccagatgatgcagggcacgcgcgacacctacaagctgcagcagaccatgcgccgcacgctcggcagctgggttgcgcgccagctgcaccgcaagccgatgatcgtgcccgtcgtggccgacatcgcccaggacgtcgaaaccgtagaaaccaagtagtccggattatccagggacgaccgtaaggagtaattgaagtcatgcccggttctaatctcactcgtattgaagccgaagaacgtaaggccgttatcgaagcgccgattcactatcacgtcgaccttgacctgacggtcggcgcgaagaacttcggttccaagtcgttcatctgcttcaacgcgaagcctggttcgtcgaccttcctcgacctgatcgccgacgaagtgacctccatcgacctcaacggcaagtccctggacccggccgtggccttccaagacaaccgcatcgaactgaccgacctcaaggagaagaacgaggtcaccgtcgaagccaggtgccgttactccaacactggcgagggcctgcaccgctcggtcgacccgtccgatggcaacatctacctgtactcccagttcgaggtgccggacgctcgccgcgtctacgccgtgttcgaccagcctgacctgaaggccaccttcgacttcaaggtgctcgctcccgccagctggatcgtcacctccaacatgccggttgccaccatcgaggacgatccgcgcgaaaccctcgacggcaccctcggcgacaagccgaacgaaagcacccgtctgtgggacttcgagccgaccccggtgatgagctcctacctgaccgccatctgcgccggcccgtacgccgaatggcacaccgaatacctgaacgaagacggccgtaccgtgccaatggcccagtactgccgacagtcgttggccaaggccttcgcgaaggacgtcgactacctgttcgacatcaccaagaagggcttcgcgttctacgccaagacctggggcgtgccctacccgtacgccaagttcgaccagatctacgttcccgaatacaacgcgggcgcgatggagaacatcggcatggtcaccatccgcgactcctacgtgttcgaatccaaggtgaccgacgcgctggccgagcgtcgtgtggtgaccgtgctgcacgagcttgcgcacatgtggttcggcgactatgtgaccatgaagtggtggaacgacctgtggctcaacgagtccttcgctgaattcacctccacgctggccactgccgaagccaccgaatggcatgacgcttgggccactttctgctccggcgagaagagctgggcgctgcgccaggatcagctgcccaccacgcacccgatcgtcgcgccgatcaacgacctcaacgacacttacgtcaacttcgacggcatcacctacgccaagggcgcctccgtgctgaagcagctggcattctacgtgggccgcacgcagttcttcgaaggtatccacaactacctgaaccgtcacgcctactccaacgccaccctggccgacctgctgagcgaactggaaaagacctccggccgcgatctcaaggcctggagcgccaagtggctggaggaatccggcatcaacacgatcgccactggcctgaccgtaaacgcggacggcaccatcgccgaactgaagctcacccagagcgcgccggccgaacacccggtgctgcgcccgcatcgcctggccgtcggcttctacaacgaagacgccgcaaccggcaagatcgtgcgcaccgagcagttcgaactcgatgtagatggcgaaaccaccatcgtcgaggccgcagccggcaagccgcgcccggcattcgtgctggtcaacgacgatgacctgacctacaccaagattcgtttcgacgccgaatcccaggcattcgccgaagccaacctgcatcgtttcgatgatgccctggcccgcgccgtgacctggctcgccttctgggatatgacccgtgacggcgaattcccggccgaacgcttcgtggacatgaccctgcgtcttctggccacggaaaccgaatccaccaccttccgttacgcgctggcctgcatgagcaccaccgcccaccactacgtggcgcccgcccgccgcgacgatgtgctgcgccacgtggccgccgaactgtggactctggccaacgccgccgaagccggctcggacacccagttccagctcgtcaccgcctacttgggctacggtgaggagggcgacgccgcattcgccgccaacgcacacggtctgctggacggcaccgtgcgtcttgaaggcctcgaaatcgacaacaacttcacgtggaccatcgtccaagcgctcacctccgtcaacgagatgaccaacgacgacgtggacgcgcagctcgccaagaaggagaccacggaaaaccgcgagttcgcctacggcgcccgcgcctccatggccaccgctgaggccaaggaatgggcttgggatcaggcgctccacaacgacgagctgaccaactcccagctcgaggccgtggcccgtggcttctccgccaccccgcgctccgatctggccgagccgttcgccgccaagtacttcgagactgtggactgggtctgggccaacaagacctaccacatggccgacgccctgctcaacggcctgtacccgggctacgccgatcccgccacgctggtcaagctcggtgacgcctggctggacgagcacattgccgccgacaatgccctgaagcgtctgatcgtcgaaaacgtggcatcctcccaccgcaccctcaaggttcgcgaatacaacgaagcgctctgatttccttctggctcccctcgggcgcgaggggagctgtcgcctcaggcgactgaggggagtcgcttccgcgagaagctacgtccacattccaacataaaacccgcaaccaatcctcaacagcgtattctcgctcaaggccggcaatatgccggtcgatgagcgacaaggatacggggaatgattgcgggcttttccataacttcattactactgattctgttggccggaatcggcgcaggattcgtgggctatgcggtaggcgcatcgtcactggtctcatacccggccctgctcgcgttcggcattccgcctgtattggcaaacgcttctaacaccgttggcgtggtcggcacgggcatcggtggcgtgatgggtgcgcgcaaagaactcaaaggccaagcggtacgctccattacgtatgtggtcatcggcgcattcggcggggtggccggtgcgtttctgttgctcaaactcgacccgagtgtctttgaatttgccgcaccagtgctgattttgctgagctcgctgatcatcgccatcaatccgcgcggccgcatgcaggccaagcaagccgccgcggatgccaccgcgcaactcaagcacatcgaagccactgatgccactgatgccgccaagcgcgcaaccacccctaccgcacctcaccgcccgccggaacaactcgtgcagcccatgagtcaggattcctggtgggtatggctgggcgtagcggcggtcgccatctactccggctacttcggcgcgggcgccggtaccttggctctcgccgtgcttgatgccgccaaaatcggcccattccacaagatcaatgcattgaaaaccctgatcggcacaggcgcgaacatcagcgcctcagtggtattcatcatccaaggcgcggtcgattggccggccgccatcatgctgtgcatcggatgcttcatcggcgggtacatcgccccgtccatcacccgcaagattcccgcaaacatcatgcgcgccgccgccgtaatcgccggcatcattcttaccatcgatctggggctcaaaacctattgattcgtgccttacactgatgcagtgaagcatacagcatggccgtcaaccgcagcgtggtcgcagaccccgataaggtggccaatgtctggcatttggcgactgcggaacctgagcgcctagaaaccagcgcggcaggcgaagcggtgaacgacttcctcgatccgccagacacgtcgcagattcacggcattgcgtgtcatgctgattggcggttcgcggcgcgagcaggtgctgttcgccggcgttatgaaggagctactcgcgcccatcaacaatccgcgatatgtcatcatcggtaaggaatggggcgtgcgcgcttactgcgtgagcttcccctgcccgtccgtatttgcccgccgccagcaggacgccgagatactgagccggcagttggaccgctgcctgacgcattgcaccatggtatacgcccgcactgaggaaggtcggcatacgctacttcgctgccaaacgcgttctttcctcaaccgcgacgagcaactgccgcacatactgaccacaacatcggagtaatagatcgttgcattcatggccgagaccaccccggtagaggagatgccgttgggcatgttcatcgcatggctcagcgtgttcctcgccgtcgttctgtttggtgttgctttgccggttatcgatgtacgctgggtagttccgttcgtcgtatttgccgctgtattgtttacaggcgcgtttgccggcccgttcttactagtgcgatggcttcgttcccgtgccggagtgcatcggtccgtccggcatgcccgctaacgaatgtatctcatcattcatccgccgaacaagatgaatatgcgggtttgtgggtgatgccattgcggctgttgaatgctgatttccggttctggagcagattccgtggcggttttttgccgagtcgggtcctagggtggagcacaacgactacgatggtgcgggtaacgcgatacaaggagtggaacttcatatgccgaagatgtttggaaccgatggtgttcgaggactggccaatagggatttgaccgcacgtctggcgttggatttgggcgatgccgccgtgcgtgtgctcggcgacgccggcacccaagacgatcagcctgaggggcgccgccgcgcgctcgtgggtcgtgacacccgtgtgtccggcgattttctggcttccgccctgtctgcgggcatggccgccggcggattcgacgtgatcgacgcaggcatcatcccgaccccgggcatcgcgttcctgaccagcgtgctcaacgttgagatgggtgccgtgatctccgcctcccacaacccgatgcccgacaacggcatcaagttcttcgcacgcggcggcttcaagctgcccgaccagaaggaagacgacatcgaggccgtgctcggccaggactgggaccgcccgaccggtgccggcgtgggccgcgtgagccacgaccagaccactgccaccaacctgtacatcgatcatctggtggccaccatcgctccgctgaacgatgacaaaacccagcccaagccgctcaagggactgaagatcgtggccgactgcgccaacggcgccacttccgtggtggctcccgaagccctgcgccgtgccggtgcggatgtaatcgtgatcaacgcctcgccggacggctacaacatcaacaagaacgccggttccacccaccccgagcagctgcaggccatggtcaaggccaccgatgccgtgatgggcgtggccttcgacggcgacgccgaccgttgtctcgccgtggacgaagacggcaacatgatcaacggcgaccagatcatgggcattctggcccgcgccaagcagcgcgaaggcaagctcaaccacgacaccctcgtggtcaccgtgatgagcaacctcggtctgaagctcgccctgaaagatatgggcatcaagaccgtggaaaccgccgtgggcgatcgttacgtgcttgaggaaatgctcaagggcgattactcgctcggcggcgagcagtccggccacgtgatcaaccgcgaattcgccaccaccggcgacggcaccctgaccgcactgaccctgtgcaacgaggtcgtcaagtccggcaagagcctgaaggagctcgccgccgacttcccgcagctgccgcagaccctcatcaacgtgccgaacgtggacaagaaggccgcctccaccaacaagcgcatccaggatgccgtggcccgtgaggaggaactgctgggagacaccggccgtgtgctgctgcgcccctccggcaccgaaccgctcgtgcgcgtgatggccgaggccgccacccaagcctacgccgacgaagtctgcacccgcctcgccaagatcgtcgccgaagaactcgcgctgtagcacccttccctaaggaaaaaaacaatgtttggaaagaacgccaaagtcgacctcgaactcaaccgtgatgtcgaacaactcatcaaaaccggcggcaaggagaagctcctgcccatcgtgcaggccggcgaaccggtgttgcgccaacggacagtggcctataatggccagctttccaagcgtacgctcgccaaactcatcgatacgatgcacaccaccatgctggaggcacccggcgtggggctcgccgccacccagatcggcttggggctcgcgctcgccgtggtcgaagaccacgtgcgcgacgacgaggatgatccgcgcgaaatcgcggaattccccttccacgtgatcatcaacccgagctacaaacccaccagcgacaaaaccgcctcgttctacgagggctgcctgagcttcgacggataccaagctgtgcgcaagcgttggctcgacatcaccgccgaatgggatgatgaagacggcaaacaccacagcgagccgctgcacggctggcccgcacgcatcttccagcacgaaaccgatcatttgagcggcgagttgtatatcgatcgcgccgaaatccgttcgctgaccaccaacgagaacctcgaggactactggtgcgaagacccggtgcccaccgaggccgctgaagagctcggtttcgcactatgaccgaccgtgcatggttcgacgccgccaagggagacattccccaatgggcggcgtccatgcccaaggacgccgatggcaccaccatcgactgggactgggtgcgttctctggacctggcgcatggcgtcggcacaataccggaatccaccccacagtccatccacgacgcattgaaggccgactacgccacacgcgagcgtctggaatcgatcatcgcccaatgcaacagcgcattcatgaccgatttcgaccggttcatcggctcctatcgtctgcctcgcgcgctcgcctacgccaatcgtcggctcaacgacaacatcaacacgctgttgcatctgggcgaacagcaacacctatgggcggtcagtcgcgaacggcgggggagggccaccattgccgtgctcaagccgtactccggcagcggcccgtcgaacgatgaccaaggcatgctggatctgagcggcgaagccggtggcacatctgccggaaacactgccgccgaaaacagcgatgtcaagttccccacaacagtcgccttggacgatgtccaagatcgtacggcagcgattcttgacgcacgcgccgaacggcgtaaggcccagcgcttccagaagcgggcgggcgatgcggcgatggcccgcgccaatctctccggcgcgacttcgccgggtggtgccgctctgccgggtggtgccgccgcgtctggcaacgctaccggacaccatcccaagcccgactggcgcgacgcctacctgcccggccgcgacgtggatgcggtgatgggcatcgacatcgaaaccaccggcatcgatccggcacgtgactacatcatcgacgtcggcttcgagttcatgaacatggccagtccgcgcccggccggcgaacccgagacatacgcctatgagcagggctattacgccgccggcgacgcctacggccagtcccgcctcgcttttggcgtgccgccggaaaacgcggcgctcggcaacgccctcatcgccaaactcaccggcatcgatgtacgcggccgcagcagcgaggccgggtaccgactcttcgacgaatggccccaagcccaggccggcctgctcgcgcggcttacccagcagccgtacgtggcgcataacgccaccttcgaacatagctggttcatgctgaacgtcgccggatacgcggaaagctaccgcgccgggcgcatcaccatcatcgataccctgccgatgagccggcagtgggaccccggcgcggtacccaccaacgagcatccttacggagacaacacgctcgacgcctacgccaaacgtcagggcgcgcttgattccgcccacaacgaacgccacctgggccttgaggattcgcacatcatgctggtggccatgaaacaccatctggcggcgctgaaagcgcaagggaaagggccgtgggggtccaccggcagggcgggcgtcggcggcaagtcctgcggtcgtaagcggtgagtacactattggtctcgtgagtaactatcaggacagccgacagcagcgtgagaaccgccgccgcaccatcgtgcgtgtggtgtgcgtggtcatagctgtggccatgctcggctccctggtcatcccggcgatttacgcggggctttgacgttgccttcgcatattcgtgcccgcagttgaacacgtctgatgcgagggattcgtgaggtcgcccggccggttatcggcaaggcaggcccggaaccttctgacagcatggattgcaggcggatgcgcgtgtggcgcggcaatgcccgccaacgccagaggaatgtgcgaaggctgtcaacaaggacgtgacttcccaaggaatctcaaagaatcaacagtaaggtaaaccacgatggcagaatttgactttacccaggcgatcggcgaagcccgcgccaaatacgaatccatcgccaaggcgctggacgtcgaccgactcaaggccgatatcaaggatctcgaaacgcaggccgcggccccgggcctgtgggatgacccggaaaacgcccagaagatcaccagccggctgtccgccgcggaatcgcagctgaagcgtctgaactccgcctcccagcgcatcgacgatgtggaaacgctcgtcgaactcggccacgaggagggcgatcaggactctctggacgaggcgcaaagcgaaatcggcgagatccagaaggatctcgaccagatggagattcagaccctgcttgacggcgaatatgacgaacgttccgccgtggtgaccatccgctccggtgccggcggcgtcgacgcggccgacttcgcgcagatgctgctgcgcatgtacctgcgctactgcgagcgtaacggcttcaaggccaaggtcatggacacctcctacgccgaagaggcgggcatcaagtccgccaccttccaggtggacgccccctacgcttacggccgactgtccgtggaaggcggcacccaccgtctggtgcgcatctccccgttcgacaaccagggccgccgccagaccagcttcgccgccgtggaagtggtgccgctggtcgaggccaccgaccatatcgacattccggatacggacatccgcgtggacacctactgttcctccggccccggcggccagggcgtgaacaccacgtactcggccgtgcgcatcacccaccttcccaccggcatcgtggtgaccatgcaggatgagcgttcgcagattcagaaccgtgcctccgccatggccgtgctccagtcccgactgctcgtgctgcgccacgaggaggaggccaagaagaagaaggagctcgccggcgacatcaaggccagctggggcgatcagatgcgctcctacgtgctgcacccctaccagatggtcaaggacctgcgcaccggctacgaaaccagccagactcaggccgtgttcgacggcgacatcaacgcgttcatcgaggccggcatccgctggcgccatgaacagcgccgcgccgccgaaaccgaggagtaaacagcattatggcgctgatctcactggacaatgtgtccaagatctatcccaaaggcacccgaccggcgcttgacgacatcaacctcgatatcgaacgcggtgatttcgtgttccttgtgggtgcgtccggctccggcaagaccacgctcttgagcctgctgttgcgcgaggaggaggccaccagcggcgagattcgcgtggccggcaacgatctgcggcgcatcaccaaccgtcaagtgccgcagtaccgccgttcgctgggcttcgtgttccaggattacaagctgctcaataacaaaaccgtatgggagaacgtggcgttcgcccttgaggtaatcggcacgcggcggtccaccatcaaatcgttggtgcccaaggtgctgaataccgtgggactcaccggcaaggaaaagaactatccgcatgagctctccggtggcgagcagcagcgtgtggccatcgcccgcgcctacgtgaaccacccgcagattctgctggccgacgagcccaccggcaacctcgacccgaccacttcgctgggcatcatggaagtgctggacgccatcaaccgcaccggcaccaccatcgtcatggccacgcataacgaagagatcgtcaactcgatgcgcaagcgcgtggtcgaactgcacaacggcaagatcatgcgtgacgaggctcatggctcctacgattccgccctgttcttcccggatgccgaagtcgaagccaagtccgacaccgcccatcatgtgctggcggcggcgaccaaggccatcgagggcagtgacgagccgtctgaaggcatcgcccgtttggccaattccgtgcattccggccgcaccggccgctatggcgagacgtttgcgccgctggaagacacgctgacctggggcaagggcattccgctggacgagcaggccgccgccctggaaagcacccaggcgttcgacccgttcaaggacgagtccgccgcgaccgccgcggttgccgatacgtccgtgtcatccaccgccgagccgccggccccgccggagccgcccgcaccgccggaaccgcccgcaccgccggccaacgagcaggccgccgccgagcagcctgctgacgagcagtccgccgcagaccaaacatccgacgatcaacccgctgagggcgcgaaggagtaagggggatcatcatgcgagcacgattcattctgtccgaaacgtgggccaacctcacccgtaacctgtcgatgctgctgtcgctgacgctggtcaccttcatctcattcctgttcatcggcgcttcggtgcttactcaggcgcagatcaccaaagccaagggcgactggtacgacaaggtcgaggtcgtggtatggctatgccccgacggcaccagccagtccgcgaactgcgcttccggcaaatcaccctcagccaatgagatcacggcactgcagaaaaccattcgcgacgaactcaacgacgtggtctccaacatcgactatgtcagcaagcaggatttctacgacaacaccttcaccaagcagtacccgaacggtgaattccaaggccgtacgctgaccgcggacgatatgcaggactccctctggctcaagctcaaggaccccaccaaatatcaggtggtctccgaagtgctctctggcaaggagggtgtggaagacgtcaccgaccagcgccagatcttcgacccggtgttcgccgtgctcaaccgagccacggcggttacggctgtgctcgccggcgtgatggtggtggtcgccatcctgctgaccggaaccaccattcgtatgtccgccgcatccagacgaaccgaaaccgaaatcatgaggtacgtgggtgcctcgaactggacgattcgtctgccgttcattctggagggcaccatcgcctcgctgatcggctcggtgctctcgtgcctgatgctttcggctatcgtcaacgtgttcgtcaccggctggctggcgaaatccgttacatggattccttatgtgaatcagctcacggtactggtgatatcgccgttcctggttgtgggcgcgatactgctgtccatcatcgcttcaaccatctcgttgcggcgttatttgagggcgtaacgcgaccggcttacccgcgagaaatgtgatgacatcgtgtgcaagcctctcaggttcgcatgttatggtattggcttaagtgagcgaaaggactattcacatatgacgaacgtacgtgtgatcaagcccgcactggcggcactggtggccgccgcggcctgtgtgggaggtctggcgttcagctcggcacagcctgcccaggcagacacctattccgacctgatcaatgcgcagaaccagcacgccgcgtcggtacagcgcgaggccgaactcaagcagcagctggccggtgccagccaggacctggcgaataaggtacttgagctggacgatctgaccaacaacaagattgtcgccgcgcaggccaaggtcacacaggccaacgaggatgccgccaccgctcaggacgaggccgatgccgcatccggacgtctttccgccgcgcagaaagacaaggagacgctcgaggagcagatcaagcagaccggcaaggactacgatgacgcgcacgccgccgtggcccagctggcccgtgacgagatgcacggctcgaatgcttccgacgtgatgagcgtggtgacgggtgccaccagcacacaggacttcgtcaactccatgcagtcccgggacgcgttgtcccgcaacgaggcgaatgcggcttcctccgccgcgacctcactgagcacgtcgaagaaccgtggcgagcgcttggcggccatcgaaaagcagatcgctgtgctcaagacccaggccgatgagaaggccgcttccgcacagaccgccgccgaaaccgcgcaaagcgaacgtgacgctttggacaagctgcgccaggaaggcgaagcaaggcgtgacgaactgtcttccatgatcgacagtctggattcccaatccgccaagcaggcggcccggaccgtactgatcgcttcccaggtcgattcctacaatcgtcagttccagaaggagcagcaggacgccgccaaccgggtggataccggtaaccagggcggcacgccgtccactccggtgacccccgctccggcgcccgctccggctccggctccggcgccggcgccggcccccgcccccgcccccagcgtcggcggccaaggcacgtcgaacggtgattacggcaacgcctatgccgccggccagtgcacgtactgggcgtatgaacgccgtaggcagatgggcattggcacgccgtcctatctcggcaatggcggcaactggtggcgcagcgccccctcgtacggcttgcgcgtggaccacaaccctcaggtcggtgcggcgctctccttcctgcctggtcaggatggtgccgacggtacctatggccatgttgccgtagtcgaagccgtgtatggcgacggcacattccagatctccgaaatgaactggggtggtccgtggaacatgcactaccgcaccttgaccaatttgggtcagtactggttcgtccactgaccggttggttcggccgatatatgcggttgaagggttcctcttgaaggggaaccctttttcgtattcgaggccggtccgtgatatcgtcggatgttgcgttgctacccacgaaaggaggagacatgcccaaggaaaccggtgagaaactcatcgtacagaacaagaaggcccggcatgactatgccatcgaagacaagtacgaggcagggctggccctgaccggcaccgaggtcaagtcgttgcgcgaaggccgcgcatcgctgtccgaggcgttcatctccatcgaccgccgcggcgagatgtggctggagggcgcgaacatccccgaatacctgaacggcacatggaacaaccatgcgcccaagcgcaagcgcaagctgctgttgcaccgactgcagatcaccaagctcgcccgcggcatcgaggccaagggatacacgattgtgccgctgagcctgtacttcaaggacggtcgcgtcaaggcggagatcgcactggcccgaggcaagaaggaattcgacaaacgtcaggccctgcgcgaagagcaggacaagcgcgaagccctacgcgccatgcgctacgccaacatgcgccactaatcccgtcccttggctcccctccggaggggagccaagagtaggatgtccacgttgtgggccatttcgcccacgattaacgcttccgtagcattgcactcctacgctccggaaccatctgggaaacatacccgcccagctgactatccggagagaggaaatccaatgtctctaagcaagggaatacaatccgcagcggccgccgccctgagcgcggccatgctgatcgccgtggcggcctgcggcacgactgacggcaccgacaccgcatccaagagcggcgattcatccaaggactcgtccagcacttcgattcaaggcttcgacaccagcagcatccagaaggacgacgagatcgccgcactgctgcccgattccgtggccggcgacggcacgctgaccgtcggcaccgatacttcctatgccccggccgagttcctggccgaggacggcaagaccccggtcggcttcgacgtcgacctgtccaaggccatcgccgccgtattcggcctgaaggaagaaaccatctcctctaccttcgactccatcattccgtccgtgggctccaagtacgaccttggcatctcctccttcaccgtgaccaaagagcgcatgcaggccgtcgacttcgtcacctacttcaaggccggctccacctacgtggtgcagaagggcaacccgaacaaggtcgactcctcgaacctgtgcggcgtgaaggtggccgtgcagaccggcaccacgcaggaagaggaagtcaacaaggccaacgagcagtgcaaggcggacggcaaggatgccatcgacatccagtcctccaagctgcagaccgatgtgaccaccgccgtggcttccggcaaggcctccatcttctacgccgattccacggtgttcgcctacgccatcaagcagaccggcgacaccttggagacgctcggtgaagacgccggcggggtgcccgaggccgtggccatcaagaagggcgataccaagaccgccgaagccgtgcagaaggccatccagaagctgatggacgacggcacctacaagaagatcctcgacacgtggggcgtctcttccggcgccgtcgacaaggccgagatcaacccgtccgtcgagtagtttcggttactatgaagactcccgttgccctgcggcgggagtctttttgtatatgtatgcactgtagtgtataaatatgcttaaccgttgatcgttgccgttgaagcggcgtaagagagaagaagaaacgattatgcagtccaccaaactgaagtccattatggccattgcactgagctcggccatgctgttcgccaccgccgcttgcggcacctccgacaaggccgatgccggtacggattccgccaagggctccgatgccgccaccatcaccagctacgatgtcagctccgtggagaaggatgacaccatcgccacactgctgcctgaatccgtgaccaaggacggcaagctcaccatcggcaccaacccctcctacgccccggccgaattcctcgacgccgacggcaagacccagatcggctacgacatggatcttgcccgcgccatgggcaacatcttcggtctcgataccgaaatcgtctcctccaacttcgatacgatcatcccggccatcggctccaagtacgatctgggcatcgccgccttcaccatcaccaaggagcgcatggaatccgtcgacttcgtctcctacttcaccgcaggcatgggctatgcagtggccgcaggcaaccccaagaacgtcgatgagaacgacctgtgcggtctgaacgttgccgtcgagaccggcaccgtcgaggaagaggccatcaacaagaccgccaagcagtgcaaggcggacggcaagaaagacatcaccatccagtcctccaagcagcagaccgacgccaccaccgctgtggtgaccggcaaggccgacgtcttcttcgccgattccccggttgtcggctacgccatcgcccagaccgatggtcagctggaacagctcggcaaggacttcgatgaagtgccgaacgccatcgccatcaagaagggcgattcccagaccgccgaagccgtgcagaaggccatgcaaaagctcatggacgacggcacctacaccaagatcctccagcactggggcgtcgaatccggcgcactggacaaggccgaaatcaacccggccgtcgaatagccgacaagctgtcgcgaaaattcgaatggggcgcactgtttgtaacacagtcgccccattcgtacactaaggttcaacgctagttgcaacttgcagttcaggctgcccaacacgtccaaggaaccaaattatggcgaagaaagaagtcgacggtgagggagtgaacatccccaaccgcatcaaggcgctgccggtcaagcgccccggcccgattgtggccgcagtgatcgtggtgctgctcgccgcgatgctcattcaaggcttgattaccaatccgcgactggattggcccaccgtctggaagtacctgttcaacgagaacgtgcttgaaggcattcgctataccttggagctcaccgtgatctccatggtcgtggcgatcatcctgtcggtgattctcgccatcatgcgcaaatccatcaatccggtgctgcgcggcgtcagctggttcttcatctggttcttccgcggcacgcctgtgtacacgcagctcattttctggggtctgttcgccgtgctgattcccaagattagcctcggcattccgttcacctcggtggagttctggagcatcgactccaacgtggtggtcaccgcattcaacgccgcatggattggtttggctctgaacgaggccgcctacctgtccgaaatcgtgcgtgccggccttgaagccgtggaccccggccagaccgaggcggccaaggcattgggcatgaaccgcacgctcatcatgcgccgcatcgtgctgccgcaggctatgcgcatcatcatcccgcccaccggcaacgagaccatcggcatgctgaagaccacctcgctggtcaccgccgtgccgttcaccctcgaactgcagttcgccaccaacgccatcgccaaccgtatctacaagccgattccgctgcttctcgtggcctgcttctggtacctgctgatcacctccattctgatggttgtgcagtcccgccttgaggcgcacttcggcaagggcttcaacgcccgcccggtgggcaccaagggcaagcagccgccatacgatccgccgtaccccggcaagtctgacggcgagccgaaggacgatgtgaacaaaatcaatcagaccaccttcgctgggctgaatgcgtaaggcgggagcgagaattatgactacgaacgacatcaccaactccgctccggtcgtgcgcaaggcggctgacggttccgtgattcctgctgtcaaggccgtgcaggtgcacaaggcgtttgggccgctgcatgtgctcaagggcatcgatctaaccgttatgcccggcactgtgaccgtgattctggggccctccggttccggcaagtccacgttcctgcgtctgatcaaccagctggaaaccctgaccggcggttccattgaggtggacggcgaactcatcggctacaagcacgtgaccaaaaacggccaggacatgctgcagaccctggacgataaggagatcgccgcacagcgctctcgcctcggcatggtgttccagcgcttcaacctgttcccgcacatgaccgcgctggaaaacgtgatggaagccccgattcacgtgcagcaccagtccaagaaagccgcccgtgacctggccgtggccgagcttcagcgcgtcggtctgggcgatcgcatggactattacccctcccagctgtcaggtggtcagcagcagcgtgtggccattgcccgtgctctggccatgaagccggagatcatgcttttcgatgagccgacctccgcccttgaccccgaactggtgggtgaagtgctcaacgtcatgcgttccttggccagggaaggcatgaccatggtgtgcgtgacccacgaaatcggcttcgcccgcgaagtcgccgaccagatcgtgttcatggacggcggcgtagtcgtagaaaagggcggccccgacatcatcgaccaccccaccgagcctaggtttaaggacttcctacagcacgtgctgtaggaaggctgttatattgcctcagcactgtcgtgcttcggcgtcgcctacggggagcccactgggctccctgctttacggctccgtctacagcacgtgctgtaggaaggctcgttgttgcagctccaaaaacgtacgctgatgaactcagcgtacgtttttttgcgacgcctaatcgcacccccatctcgtgaagaacgtacgctgagtggtagtcagtgtacggttttcacgaaggggcatgttccaatcctgcaaaggcggcgggttggattcgctttgcgcaataatcgtccgctaggctggtgagccatgtgtggaatcgttggatacgcgggaaatattgaaacggcatgcggcaagcctttggaggtctgcctgcaaggcctggaacgtctggaataccgaggctatgactcggccggtgtggcgctgaccgcgcccggcatggataaggtggtcgtgcgcaagaaggccggccgtttgaagaacctggtcgaagacatcgagcgcaagccgatgccgctcgccacggtgggcatcggccacacgcgctgggccaccaatggcgagccgagcgacgtgaatgcccacccgcacaccagcatggacggcaaggtggccatcatccataacggcatcatcgaaaacgcctctcagctgcgtttcgacctgcaagccgaaggctaccgattcgcctccgccaccgacactgaggtggccgctaagctgctcggcaagatcgtggacaagattatcgcggacgaaggcaagccagacttgttcaaggctgtgcgccgtatggcccgcatgcttgaaggcgcgttcaccattctggccaccgactgccgccagccggacatcgtggtcggagcccgccatgattcgccactggtcgtgggccttggcgagggggagaacttcctcggttccgacgtcgccgcattcgtggcctacaccaagcgcgccatggaagtcgaccaggatcaggccgtatgcgtgtccgccgacaaggtcatcgtcgccgatttcaacggcaacgtggtcgaaaacccgaagacctacaccgtggattgggatgcttcggccgccgaaaagggcggctgggattcctttatggacaaggagattcacgaagaccctgccgcagtgcagcgcaccctgcttggccgcttcgacacgaatggcgacatcacccttgatgaagtgcgtatcgacgaacacgacttcaaggccatcgacaaaatcatcgtcgtggcctgtggcaccgccagctacgccggccaggtagccaaatacgccatcgaacactgggtgcgtatccccgtggaaatcgaactcgcgcacgaattccgttaccgtgacccgattctgaccccgcgtacgctcgtggtggccatttctcagtccggcgaaaccatggatacgctgatggccctgcgccacgcgcgcgaacaggggtccaaggtgctggccatctgcaacacgcagggtgcctccattccgcgcgaatccgacgccgtgctctacacacacgccggcccggaagttgccgtggcatccaccaaggcgttcgtggcgcagattaccgccgcctacctgctgggcctgtatctggcgcaggtcaagggcgcgatgttccgcgatgagattcatcagatgctcgactccctgaaagacatgccgcgcaagattcagtgggtgctcgacacccagcccaagaccatccaggcggccgccgagcgcatggtgaacgccaactccttcttgttcctcggccgccacgtgggctacccggtggcgcttgagggcgcgttgaagctcaaggaaatcgcctacacgttcaccgagggcttcgcggccggcgagctcaagcatggaccgatcgcgctggtggacgagggtgagcccgtggtgttcatcgtgccgccgcagcgcggccgcaatgtgttgcacgccaaggtgatctctggtatcgaggaggtcaaggctcgtggcgcgtacatcatcgccgtggccgagcagggcgacccggatgtggaacggtacgctgacgtggtgttctggcgccccgcctgcccaacgctgatgagcccgctggttgacgtggtgccgctgcagctgttcgccatggacatggcaaagctcaagggctacgacgtggacaagccccgcaacctcgccaagtccgtgaccgttgagtaagccacatcggtatgtgattgacgagcctcatattccgtttgagatggacgtgctgtatgaggacgagcggatcatcgtggtggacaagccgcattttctggccactatgccacgcggcatgtggtatcggcagaccgcgctgatccgattgcgtgagcggctgggggagccggacatcacgccagcgcaccgattggaccgcatgaccgccggcgtattggtgttcgtgcgggattcggcctgccgcggcgcgtatcagatgctgttccagaaccggcaggccgtcaagatctatgaatgcctggcaccctgccggccgatcagcggcccgcgattcggcacgatcatgcaggtcgaaccgccacgcccgttcccattgctgcgccgatcgcacatcaccaaggaacacggcacgatggccgcattcgaggaaccgggtttggccaacgccgaaaccctcatcgagcgcggcgacctctgtttccctcccgctggcgggaggtggcgcgaagcgccggagggtggtccccatccgggaaatcaccccatctgccgctacacactccacccgcgcaccggcaaaacccaccaattgcgcgtccacatgaattcgctcggcctgcccatcgtgggtgacgacttctacccgcgcatccagacacgcccctacgacgatttcagccagccgctgcaattagtggcgcgtgtgctacgattcaccgatccaataacaggcgagaagcgcgaattcgtttcccgtgtgccgcttaagatctgatttcttaggggggatggcgagaccaatccccgcccgtccgaatcactgtccctttcgactggccatccagctcattgcatcgtcgtacaccatcatgatgcgcttgcgatagctatcgatgaattcctgcgcaccaatgctcgcgataacgtcgtgagcgggttgcacggtgctgtcgaatgcctccggcagcctatccaccaaggtgtggaatcgtaaaatcacggattcctcatctaatcccatccgctgtgcgaatcgttccagatgtttgcggcgtaattgaagaagatctcggcgtccgccgatgttcatcgccaaagtggcatttatgatctgcttgccatgccccaaataagggaacaccgaagcaaggtcatagagcggggcaagccgcacggacgcgccatcgagcaatagcgagtagttcttggcgtggctgtctgttgccccgacgagataactggcgaggatgccgtcggtgaaggctcggatattgctttcggcctgaccgggcagaccgtgcttgcgcaacatttccgcatatgcattggacgttgggccgttgtgttcctcgtatttcagcgatgagggaatgcccagcgcttgggtaaagtcttcttggtgcagggccgtcaccgtaccattggcggacactatacggtcataccgctcgctgatgatggctgggaccccatcaaagatgtgaaaagaggtgtgggccacgggtattcccatcgcctccacaatgcgcatggtgatgtgttcgttgaatgcttggtgtggaagggtcggtatgccgggcttgatgatatgagtcgtccgcgcgattccagtggtggagaaccatgatccatcgcggttcctcagtgcgatcttgccctgctgtcccgcgaccgaccaatgctcgtctacgcttgcggactggatgcctgtgggggcggctgcgcgtagtcgattcgcgatctgcgaatcgctgattggaataagcgaatcgtcatctatgggcaagtgcgggtcggcggacagtcgtaatgcgccggtggcatcgaatccgatggcttgcaacagatcaaatgcgcttgtcgatcgggcatgatgcaatcgcatggcttcatctcgggcctgaggggattccgggaccagggcctcaaggaaattacgcgggatgtcgcctgaatattcggctgcggtaatgggcatggaaagcgatattggtgtgggtgattgcgaccaacgataggaatcgtgatattggaaaataatgctgccatcgtttgttcttcgaaactggccgatgggtgtttcgccgagaaatgcattgagagtgttttcgctcatggtgtcaccattcatagagttcggcgggctgcggggttttgcggacatccagcgacaagccaagctcagtcagagcgctgagaatggtggagaatccgggattggggactcgggcgtgttcaaattcgatcagccagcgacgtgacacgcccagccgttgggccatgtcggtctgactgatgccctggcgttgcctttcatccttgataagccgcgcgtattcggcgatatccatgacaatcatgtgcaaaatatatcacagtatagtaaagtgtgcaatattctgcacatagttggaaatgtgcagaatattgcacaaccgagtcgattggtcggtgcggaattgcctatggatcactggcaggtgaatcactgacaggtaccagtggatgccagcacatgccgctcgtcagctgatgtcgcgcacggaaccgcgttcaatcagttccggcgggattacggttttgacgccgaccggtatcttctcgccttcgcattgacggcggaccatggagaaggcggtggcgccaatgtcgtcaaagcgcagcttcatggtcgtcaggttcaagcgcgggaccatatcgaccagcgaatcatcgacgcccacgatgctgacatcctcgggcacgcgcttgcccgctgactgcaacccgagcattgcgccgtatgccatttggtcgttggcggcgtagatggccgtgcagtcggggtcgtgggccaacgccacgccggcctggtagcctgaatccgcgcaccaatcgccgatgtacatgctcggtatgcgtgctcccatttgttccaacgcttctcgccaaccgcgggcgcggctttcggcggcgcgcgaggtggacggtccggcaatgtggtagacggtcttgtgccccttgctcatcaggtaatcgacgatagcggtcgagcagccatactggtcggcgtcaacggtggggcagtggtcggcggcggattcgcagatgagcacgactggaaattctcgcggaggcttgtatccgacgaaatcggagatgcgttcctccagcactacgatgacaccatccaccggctgacgctgcatgcgatcgatggcggcggaaagcgtgcgttccgcaccgtggcgcatggtctggatggtgactgaataatcgtcatcggccgcgttggccacaatagaatcaaggatgcgggcgttgccgaacgtggcggtgttgaacatcaccacgccgatatcctggaagcggccgtgctttagggctcgggccgcataattcggacgatacccaaggcgttccattgcggcttcgacacgctggcgtgtttcgggtttcaccgcatcgctgccattcgccacgcgggacactgtctgtggcgaaacgccggcggctttcgctatgtcttgcatggacacctgtgttggcctcgacatttcaccctcgcttgactcattaatgtcggtgtttcgtttgcaacgcttatcttagggtcgcttacggtaacgataacatcgttgtcttcgtgaccattgtagcagagtgactgagaaacccttaattcaacacggtactcaacacgattggacaatgttacaaatggtgttatgatgataacgcaaacattttggtcaaccttcgaaggagaggggttgggaatggcttcagccgatatcgcagctgcgcccgtgcattcgggcaaggctcgtgtgaataagcacaaggccgattggcgtggatggaaattcatgtggccttttgcggtggtgttcgtgttcgtgttcatcgtgccgatcgtgtacgccgtttatatttcgttcttcaagaagcagatgatcggcggcaccaagttcgtcggcttcgagaactacgcgcgcctgttgggtgatggccagttctggagcagtgttggtcgtgtggccctgttcacgtgcgtgcaggtgccgatcatgctgtgcctgtcggctttgatggccctggcgttggattcgatgaagctgcatggcacgaggttcttccgtatctcgacgttcctgccctacgcggtgccggcggtggtgtcgacgttgatctggggtttcgtgtatggcgcgaagtacggcctggtgggttcgttgaacgatttcctgggcacggacatcgacgtgctcgccccttccgtgttgttggccagcatcgggaacatcgtgacgtgggagttcacgggctacaacatgctcatcttctacagctcgctgtcgaccatcccgcattccctgtatgaggcggcgagcatcgacggcgcgtcggagtggcagatcgtgaagagcatcaagcttcccgaattgcgcggcagcctggctatcacggtgatcttcagcatcatcggctcgttccagttgttcaacgagccgagcattttgcagaacatggttcctggtaatgcgatcacgacgtattacacgccgaacatgtacgcgtacaacctgagcttcagcggcaaccagtcgaattatgcggccgcgttggcgatcgtgatggccgtgatcaccatggccatcgcctacatcgtccagttgaacagcctgaaggagcagatgaagtgacgatgaccgctgttcgtgttgaggaatcgatgatgatcgtgaaggagcgtatgtgatgagtgcagcaacgacttcggccgccggtcgcctgaccgacgccgagctcaaggcccaggagaaggccgccaggaaggcggagaaggcccgccagaagaggatcgccgccgacgaggccgccgaacgcaagcgcagcgcgaaggccgggttcgcgaacgtgaacaacccgaggcgttccacgttgttgaccgtcctgtgcgcggtcttcgccgtgtactgcctgttcccgttcgtgtacctgctgatcaacgcgacgaagacacaggccgacttcacgagcacgttcggcctggggttcggcaagacgttcgctttgttcgacaacatcgcgaccgtgttctcctatcaggacgggatcttcgcgcgctggctgttcaacacgatcctgtacgtggtggtcggcgccggcggcgcgaccctgctggcgatcatgggcggctacgctctggccaagttccgcttcccggggcgcaaagcggtgttcgtggtcatcatcggcgcgatcagcgtgccgggcatcgctttggcggttccccagttcctcctgttcgccaaattgggcctgacgaacaccccgtgggccatgatcatcccgtcgctgatcagcccgttcggtttgtacctgatgtggatcttcagcgagcaggccgtgccccaggagctgctggaggcggcgcgcgtggacggcgcgtccgagttccgcacgttctggcagatcagcctcccgttgttggctccgggcatcgtgacgacggccctgttcacgatcgtggcgacgtggaacaactacttcctgccgttgatcatgctcaaggacgcggactggtacccgctgaccatcggcctgaaccagtggaaggaccaggcgagcacggccggcggccaggcgatccagaacctggtgatcacgggctccctaatcacgatcatccccttggtcatcgcgttcttgtgcctgcagaagtactggcagtccggcctggccgcaggcgccgtcaaggagtgaccgtactttggctcccttctggtggagggagccgagataaaggcataaccactaacagaaggaggcacctatgcagatattcgcattgttgagaattgtgcaggtgcctccttgtgtgtctgtgcaacgtgaggaatttattcccgtagacgcagattatcgataaaattcaataaaggaactgaatcatcatggaacgtaaagagttcaagtggccgcagcctcttgcgggcaacgagccccgcatctggtacggcggcgactacaaccccgaccagtggccggaggaagtctgggacgaagacatcgagcttatgcagcaggccggcgtcaacctcgtctccgtagccatcttctcctgggccaagcttgagcccgaagaaggcgtgtacgacttcgattggctcgaccgcgtcatcgacaagcttggtaaggccggcatcgccgtcgatctcgcctccggcaccgcatccccgccgatgtggatgacccaggcccacccggagatcctctgggtcgactaccgcggcgacgtctgccagcccggtgcccgccagcactggcgcgccaccagcccggtcttccttgactacgcgctcagcttgtgccgcaagatggccgagcactacaaggacaacccctatgtggtctcttggcatgtgagcaacgagtacggctgccacaaccgcttcgactattccgaagacgccgagcgcgccttccagaagtggtgcgagaagaagtacggcaccatcgacgccgtcaacgacgcttggggcaccgcattctgggcgcagcgcatgaacaatttttccgagatcatcccgccgcgcttcatcggcgacggcaacttcatgaacccgggcaagctgcttgactggaagcgcttcagctccgacgccctgctcgacttttacaaggccgagcgcgacgccctgctcgagatcgcccccaagccgcagaccaccaacttcatggtctccgccggcggtgccggcatcgattacgacaagtggggttacgacgtggacttcgtgtccaacgatcactacttcacgcctggcgaagctcacttcgacgagctggcttactcggcctccctatgtgacggcatcgcccgcaagaatccgtggttcctcatggagcactccagctccgccgtcaattggcgcccgatcaactatcgcgtcgagcccggcgaattggtgcgcgactccctggcccacttggccatgggctccgacgccatctgctacttccagtggcgccagtccaaggccggtgccgagaagtggcactcttcgatggttcctcacgcgggccccgactcccagatcttccgcgatgtgtgcgagctgggtgccgacctcaacaagcttgctgacgagggcctgctgagcaccaagctggtcaagtccaaggtcgccgtcgtcttcgattacgagtcccagtgggctacggaacacaccgccacgcctactcaggaggtacgccattggaccgagccgctcgcgtggttccgcgcgctggcggacaacggtctgaccgcagacgtggtgccggttcgcggcccttgggacgagtacgaagccgtcgtgctgccgagcctgaccatcctgtccgaagagaccacgcgccgcgtgcgcgagtatgtggcgaacggcggcaagctgttcgtgacctactacaccggtctggtggacgacaaggatcacgtctggctgggtggctaccccggttccatccgtgacgtggtgggtgtgcgcgttgaggaattcgccccgatgggcaacgacttccccggtgccatggaccaccttgacttggacaacggaaccgtggcgcacgatttcgccgacgtgatcacctccgtggccgataccgctcacgtggtcgcctccttcaaggcagataagtggaccggtttcgacggcgctcccgccatcaccgtcaacgacttcggcgacggcaaggccgcatacgtcggtgcccgtctcggccgtgagggtttggccaagagcctgcccgtgctgctggaggaactcggcatcgagacttcggctgaggacgatcgcggtgaagtgctgcgcgtcgagcgtgcggacgaaactggcgagaaccacttcgtgttcctgttcaaccgcacccacgatgttgcggtcgtggacgtggaaggcgaaccgctggtcgcctcgctggcccaggtcaacgagtccgagcacacggccgccatccagcccaacggcgtactcgtcgtcaagctgtaaaaccgcgcatagcgcctaattacccaacggctcccttgctgctcatcgtagcaggggagtcgttttcgtatctccagcaaagtcgggtagggtggtcaccgtgcgaggcaaaaacagagtgacgatggcggacgtggcccatgaggccggtgtttcggtagcctcggtgtctaattttctgaacaaacagccatatatgagcgaggcgatggccgcgcgtattgcggaagccatcgacaggctcggatacaaagtcaactcgtcggccagaaacctgcgttccgggcgtacccggttgctcaagctggttattcccgatctgcggcaggtgtacttctccgaactcgccgaggatattctggccgaggcccggcgacatggctacggcgtcatcgtggaatccaccactaacaatcgtgcccgcgagctggaaagcatcgcatcgatgggcacgcacagcgcggacgggctcatcttaagccctctgatgatgacggttgacgatatcgcggctttggatggcgattacccgctcgtactgttgggtgaacgtttgttcggcgtcaacgcgccgcacgtagtgattcgcaatcgcgaaggggccgccgccgcgacttatcacctgcttgatgccggttgccgccgcatcgccgtagtcggtgccgtgccccaccccgagcacgatttctcgtcgggctccatccgcacccacggatatcgtgaggcgctggccgcgcgcggcatcccctgtgatgacagtctgcttatcgaaacccaaggctgggggagcgccgacggtttggtcgcggtggacaccatgctggagagtggcctgcaattcgatgccgtgttcgctttgaatgacttgctggcgtggggcgtgctgcgtgaactgcgcgaacgcggcgttgccgtgccggatgatgttcgcgttatcggcttcgatgacgtggaggaatcggcctacatggtgccgtctctttccaccgttaaccccggcagggaagccatcgcccgactggccgtcgaatccatcatccaacaggtcgaatccggcagccgtgcccccgcccaaaccatcgaggccccctatagcctctccctgcgcgagtcctcaccggcgttggcgcgcgcctgatgaatccgtggttcgaaatatccgaagtgaatgacaaggcccgtcaatcgtatggtgattgacgggccctggtcgtattggacttgactgtacttggtacgggcgtgactctccgtcttttagccgtggaattccacgctgatccaggagatggcgggaagcgttgccgtgcaggtgccggtggcgttcatcgcaatgccgagcggttgcggcgtgacggcttcgggcgcttcggcggtgttggtgcggtacggatcgtcctcatgcaacagttgcgccttgccgagcgcgagcgtgccgagaccgggcaggccgggcagcccggaaaggtcgatggtgagcgtgtgtggggtgttggcgtcgcggttgacggcaagcagcagaccggtgcgggcctgttcatcccacgtgactaccgcgtcgatggccggcacgtcgccgtatgcctcggtatggatggtgggggagctgatggccggagcgtaggcctggccgcgcgcgtgaagggcggcttcggcgaacgggtagaacgtggtctgccgccatgccgggccgtgttcctcggccatgatgggggcgatgacgttgaccagctgggcgcgcgaggcggaacgcacgcgatcgcagtgcttgagcagggtgatcatcagggaaccttcgaccaccgcgtcggccgcggtgtagatgtcttccagcaaatgtggagacttgggccatggctcgtggtgcaaaccctgcgcggcctccgccttccactggtcttcctgctcgttccacttgtccgaataccatacgccccattcgtcgaaggacagggcgatgtctttggtgccgttgttggcttcgcgcgcctgatcggccgcgtccgagacggtggcgatgaacttggtcatgtcttcggaagaggccaggaagtcctgcatggaggcggcggcccgggttttatggccgcggtcgaagtagtaggcatggcaggagacgaagtcgagattctcgtaagccttggtgagcacggtcttctcccacgtgccgaaggtcggcatataggcacccgaggaaccgcaggccacgagttcgagaccggactcggcgagcttcatggcgtgggccaccttatccaccgcgccggcatattcttccgggctcatgtggcccacctgccacgggccgtccatttcgttgccgatgcaccacatcttgatatccatcggctcctcgatgccgttggccacgcgctgatccgcccaagcggtgccgggcgcgccgttgacatactcgagctcgtcgagcgcggctttcagcccccgggtgcccatgttgacggcaagcatgatttcggtgccggctttctggctccagcggtagaagtcgtcgatgcccatctcgttggtttcggtgcaatgccaggccaggtcgcggcgcatggggcgattctcgcgtggaccgatgccgtcttcccagttgtagttggatacgaaattgccgccggggtagcgcacgcaggtgacgcccagctccttgaccaggtcaagcacgtcttggcggaagccgttttcgtcggcggtgggatggctgggctcgtagatgccgccgtagacgcagcggcccagatgttctacgaatgagccgaacagacgcgggggaacgtcggctaccggagtggcgtcggcgttgagggcgatgctggcgtccggcgtggttgcgttgccagttgtggagacgttactggccgtggtgccggcggcggtcggcaccgggctgctttcctgcttgtcgggatgggtggtttcggcggaatactggctgttgtgagtggtcatgagcgggatgcatctccttcggtttgcggttagtcaccatggtgcgacgtgtcgtgtttgcgtaaacataaaacatgtggtaccgtttcttaaaacgatacaaggcttggaacaaaacgccaagtcccgtcgtttcccataacaaggaaggaaagaacgatgaagttcggcaagaagacgattgccctgattggtgctgtggccatgctctcctctgtagctgcctgcggttccacttctgccggggatggcggaagcaccggctcctctgataagaaggtcgagctgaccgtgtggtcctgggattccacactgcctcgtacggtcaagggattcgaggccaagaacccgaacattaaggtgaaggtgaccaacgccggcaccaacaaggacgagtacaacgcactgtccaacgccatcgaggcaggctccggtgctccggacatcgcccagatcgaatactacgcactgcccgaatacgtgattcgcggccacctcgagaacctttccgatctcggtgcctccgatttcaaggacttctacaccccgggcacgtggtcctcggtgaacatcaatgacggcgtctacgccctgccgatggattccggcccgatggcctggttctacaacaagggcgtcttcgacaaggccggcgtcgatccgacccaggtgcgcacgtgggacgacttctacgaggctgccaagaagattcgcgccgtggactcctacatcacctccgattccggtgacgccggcttcttcgactccatgacctggctggccggcgcgaccccgttcgagacctccaaggacggcgagaccgtgaccatcaacctgaccggtgacaagaacgtcaagaccttcaccgacttctggcagaagatgatcgacgaagacctcatcgacaccaagaccgtcggctggaccgacgattggaacaagggtctggatgacggctccatcgcatccctgctgaccggcgcttggatgccgtacaacctgctttccggcgctccgaacggtgacggcaagtggcgcatcgcccagatgccgaccgcagatggctccgagaccaactccgagaacggtggttcctcgctggccatcgtgaagtccgacgacaaggccaaggtcgccgccgcctacaagttcatggaatacgcctgccacgacgccgagggcattaagacccgtgttgacggcggtgccttcccggccgacaacgacaccctcaagtccaacgacttcctcaatatgacctccctgaccgactccgacggcaaggcccacgagtacttcggcggtcagaagttcaacgaggagctggccaaggccgcagccaatgtgtccaccggctacaagttcctgcccttcgaggtctacgctcgcggcaagttcggcgactacgccggcgatgcctacaccggcaagaccacgctctccgatgccgtggcttcctggcagaaggacctgcaggattacgccaagcagcagggctaccaggtgaagtaacggcaatcacagcagacttcctcctgtggtttctgtagcgggaggttgcgataacaggatcgggcactcttcggagcgcccgattttcttatgccatgggagcagtggcgcgcggattgcgataccaagatggcgtgttgccgaagaatgtgtataataaaagatgttatcgcaaccatagctacaaagtggcgaaacaaagccgttttgtgactactgaaccatagagtgatggttcacgatagcatgacgacgaggagagttgccatgctgttgtggtgacaatcactgcagaccgccgaaaggcgatccaaggaaggagaacagaacgatgaagttcaccgttgctaagaaggccattgcacttaccggtgcggttgccatgctgggttccgttgccgcctgcggttccgacaccgccagtggcaagccggctcaagataaggacgttaccgaaatcaccgtgtgggcttgggagcccacgctgacccaggttgccaaggacttcaccaagaagaccggcatcaaggtcgatctcaagaacgtcggcaccaacaccaaggaatacacccagcttgataacgccatcgaggctggctccggtgctccggacgtcgctcaggttgagtactacgccatcccgcagtacgccatcaagggcaacctgctggacatcaccgacaagacctccggctactccgacttctacacccctggcccgtgggcttccgtgcagttcgccggcaaggtctacggcctgccgatggattccggcccaatggccttcttctacaacaaggaggtcttcgacaaggccggtgttgacgccgagcagatcaagacctgggatcagtactacgacgccgccaagaagattcacgctctgggcgacaactactacatcacctccgacaccggtgacgccggcttcttcgactccatgacctggctggccggtgcaaagccgttccagacctcttccgatggttccgaagtcaccgtcaacctgaccgaggacaagggcgtcaagaccttcaccgacttctggcagaagctgctggacgagggcctgctcgacaccaagaccgctggctggtctgaggactggttcaagggcatggtcgatggcaccatcgcctccctgttcactggcgcttggatgcctgccaacctggccaactccgctgctgacggcgctggcaagtggcgtgtgacccagatgccgaccgctgacggctccaccaccaactccgagaacggtggttcttcgctggctgtgctcgcctccaccaagaaggctgacgctgcttaccagttcatcgagtacgccaaccacggcgacggcgtggccacccgtgtggccggcggtgcattcccggctgacaaagcctccatggagtccgactccttcaagaacaccaccactgtgaagaacgccgatggcgaggacgttgactacttcggtggtcagaagtacaacgaggttctggctcaggctgctgagaacgtgtcctccgactaccagttcctgccctacgaggtcaaggcccgcaccatcttcggcgactaccttggcaagtcctacaccggcgaccagaagctgactgacggtatcgccgcttggcagaaggcactgcaggattacggcaaggatcagggcttcaccgtgaagtaagccttgaaccctcgctgagactgcctagctaatctcacctgatacacaaagccccgtgacgaatcccgtcacggggcttttaccgttttaagccccgcctagtacactcgtcaccatgcgagtgatcggacagcgaatcaaaagaatggcaaccatagcagtgactgccatcctttccgtatccctggcctcgtgcgggcaggccacggacgacaaccgtacggagatcagcgtatggagctgggaaccgagcatgggggaggtcatccgccgtttcgaaaaagccaatccggacatccgcgtgaaatggaccaatatctccggctacggcaatctcaataccgccattcaggacggttacggcacgccggacgtggctcaaatcgaatactatgcactgttgcagtacgcggtctccggccaattgcttgatctgaccgacaaaatcggctcggattattccaacttctttaccctcggcacatggtcgtccgtgcagctcgccggccgtacctatggactgcccatggattcgggcccgatgggcttcttctacaacgaagacgtgttccgccaagccggcgtggacgccaccaagatcaagacttgggatgactattacgaggccgccgaaaagctcaaggagatcggcgcgtatatcgccgccgactcgggcgacggcagtttctatgacgcgatggtctggctcgccggtggtcagccgttccacacgtcggccgacggcaaaaccgtgaccatcgatttggatgaggatgccggcacccaacggttcaccgaattctggcagaaaatgatcgatgaggggcttgttgacaccacctccgccacatggtcggatcggtggaaaagcagagtgggcaccggcaccatcgcctccgtgttctctggggcttggatgccgtcgctgctgctgtccaatgtgccgggcgcggccggtctgtggcgtgtggctcccatgcccacctatggtgggcagcctgccaacgccgaaaatggcggctcggcgctgaccgtgttgcaactgacccgtaagccggatgcggcctatcgtttcgtggactttgtggcgcatgacgcccaaggcattagcgcgcgtgtagacggcggtgccttcccggccgattacgccaccctgaattccgctgattttctggataaaaccacgattaccaatgaccgtggcattgaaatcccgtatttcggcgggcagaagttcaaccgggtactgtcggaggccgccgaggatgtgtcggtcggataccagtatctgccattcgaagtgtatgcgcgcagtgacttcaaatcgacggtgggccaggcatacgagtggtccggcagtttccacgcctatcagcagcgacaggaagccattgagatgggcatgaaggacgaggaaggcaacccgctcgaaccattggagaagcccggcaagaaagtcagtctctccgacggcctggcccaatggcagaaagacctccgagaatacggcctcaatcagggctttacgattaagtagggattcggagttgggccgaaatcgaccgcgctatacgcggccgattcctgcatactacgtcacttcacattgcgcgagtagatgtgcgccatgcccttgaaaatcaaatccgggtcatacacgtcaatcagctcggtgtcattctcaaacactcgaccgaggccaccggtggtgatcaccttgaaatcctcgcctccgagctctctgcggaactgacgaatcgtgcgctccacaccgcccaagaacgtgtaatacaaaccggcctgcatgcaggtcttggtgttggtgcccagaatcgtatccggtcgcgtaatttccacttccggcagctgggcagtatctccccacagagcggccgcaccggcacggatgccggtggtgatgacgccggaatcgaccacgcccttgtcgctcacgtgcgtgaacgtggtggcggtgccgaaatcagccaccagaactgggccgccatactcgtaataggcaccggcgcagtcggccagaatatccgcacccagcgatttcggatcgtcaacgcgcacgttcataccggtcttgatgcccggtcccaccaccatcggatcaatgtcgaggaatttgacgatggacgaacggaaggagtgcatcactttcggcaccaccgaacagataatcacatcgtccacatcggatggctgaaaaccgctcattctcaggaattcagtcagaaacagcccatactcatcagacgtatggttggctttggtggtgatgcggtaggtgccggcgatggcatcgccgtccaaaaagcccagcacgatgttcgtattgccgatatcaacggcgaccagcatgataaccctccagattcaagatggatttcatgcgcaattctacagtcccatggctatgatggcctgcggtggtcgacccagcgtggcggccaaccgtagaacacaacatatacagaggaagaaccatgtctcaagacaatggtgcgcacgtcgaagacggcgcaaccacagatgcgagccttgcctcgcgcgcaaagaatccgaaaaaaagcggcccgaagtggtggttgatctcactgattgccgtcatcgtggcagtggcggtcgtcatcggcgtcacgctcgctttcggcggtaagaaagatgacaagtcggcctcgtccagcaaccaatatgccgacaccgtgaccatcggcctcaaactggcccccaccaatctggacatccgcaacaccgccggctccgcgcttgaccagatcctgatcggcaacgtatgcgaaggcatcgtggcacgtgactccaagaaccaggtcgctcccgccatcgcctccagctgggagacgtccaaggacggcctgacctacaccttccacctcaataagaacatgaccttctccaatggcgacaaacttgacgccgaggacgtggcctggtccatcaacgagctgatcgctaagggctatcacgacgccgacgcgctcgccgccgtcagcaaggtggaggccaaggacgccgacaccgcggtgatcacgctcaagacgccgaactccaacctgttgtggaccctgaccggtcgcgcagggctcgtgttcgacaaggacgccaagtatgacctgaagacgcaggccgtcggctccggcccctacaccgttgccaagttcgtggaaaacagctcgatcacgctgaaggccaatgagaagtactggggcaagaacaaggccaagacgcccaccgtggtcgtcaagtatctggccgacgacaacgccgcggtcaatgcgctgaagtccggtgacgtgcaggtgctcgccccgattaccgagaacctcgccgaaccgttcaagtccgattccgccaagtacacggtcaaagccggcaacggcaccgacaagttcgtgctcggcttcaacaacgcttccggttccaaactggctgacaagcgcattcgtcaggccacccgttacgccatcaaccacaaggagctcatcgcctctcgcggcggtgcggacaaggcgctcggcggcccgatcccgtctctcgaccccggctacgaggatctgacgaatctgtacccgtatgatcagaacaaggccaagtcgctcatggctgaagccggctattccaccgacaagccgcttcaacttacgctgacctacgccaacatctacggcaccgagctcggagaccagctgcgctcccagctcaagcccatcggcatcgacctgaaggtgaatgtggtggagttctccacgtggctgcaggatgtgtacaccaaccacaccttcgatatttcgctggtggaccacaacgaaagccacgacttcgcatcgtggaccgatccgacatactatttcggttacgacaacaagaatgtgaccaagctgtacaacgagggtgttgccgccacctccgacaaggagcgcgatgccaagttcgccgcggccgccaagcttgtctccgaggatgcgccggccgactggctgttcaactatcgcatcaccaccgccacggccaagggcgttgaaggattccccttcgacctcaaccagaccgttctgcccctctacaacgtgacctacacgaagtagttcgttacaggaatgagctccctcagtgagggggctcattgttaatccaagtaaagtaggcattatgcgattcgtgttgaaacggctggcgttattcgtggtggcgttgttcggcctgtccgtggtggttttcgcagcattgcgcattctgcctggcgatgtggcctccgtgatggccggcgtcaactcgccgcctgagcgtgtgacccagctacgcgaacaactcggtctgaatcggccattgattgcacaatacttcgattggatgagtgcgctggcccgtggtgacttcggcacttcaatcctgactggtcgctccgtaacctccttggtaggcgcacgtgcgtccatcacctttcccctgattattcttggcctgctcattgccttggccatcggcttgccgctgggctgtgcggcggtactggcccgcagcgcaacggtgcgtgcggtgtttcatgtactggctattgtcggcggtgccgtacctgcgttgtggggcggtctgctgctgattctgttgttcgggcgcggcgtaggattgcttgacgtgtttccctcgcaagggttcccgctggatggttggggcgcacccggttcggcgatatcagcgttggtattgccggctgtatcggtcggcatcatcgtgggagcatcgcttatgcgatacacgcgcgcggccttaggggatttggccagttccggctacatcgatatggcacgctcgtgtggcatgacgcgcactcaggcggtgttgcgtgtgggattgcggttggcaaccccgcagctggtgtctgttatcgggctgaccttcgcttcgatggtcactggcgtgatggtcatcgaaaacctgtttgcgttaccgggcatcggcaacggtcttgtgaccgacgtgggcaaccgcgacctgattgccgtgcaaagcgagctgttcctgctgaccgcgttctttttgactgtcggcctcgtggtcgatttgctccaccgcgtgctcgacccgcgtctgaaaaccgctaccgccattacggaggtgaccgcatgagcaatgttcgtcgtgcgacgactggtggtcgacgggctgccttcgtcatcgtcctgcactccatgtggcgtcgtgccgagggcaaattcgcacttatcgtgctcgctctgtggttgctcattgccatcgtttccctgttctggaccccgcaatcgctgtgggccactgatggctaccatgtatgggccaagccgtccgccgagcactggctcggcactgacggcaccggcgcggacgtgttcagctggctgctggccggctcacataccaatcttgtgatcgtgctgctgaccgtagtggcatctatggcttgggggctgctgctcatcgcggccatggtggcacgcaatgcggcgctcgccagttcttcggtagtggtagttgatgcgttgatttccgttcccaccgtgttgattgcgttgattctggctgtgccgttgggagcgtcaatcgcggtgattgtgatcgcctgcggcttcggatatgggttgaatctggctcgtgtggctcgccccgcagcgttgctggcggcccgctcgtcgtatgtggaatcggccttggccaatggtgccagcgggtggcgtgtgctcataagccatgttatgccgaatattctgccggtattggctgtgcaactgtcattgtcggcgggcacggcggtgttggctgagtcggggcttacttatctcggtatcggtgtgccgtccggtgtgccgagctggggacattctctggccacttcggtcaaactcatcaacgtgttcccattaaccgtagtgtggcccggcctgatcgtcacggttgtggttgtggcgctgaatatttttggtgatgtgctgcgcgatgccatcgatccggtcaccaaccccgcattacgtgaaataggaggcgaacgatgagcgtcgatgttcgcgggctgaaaatcacgattggcggcaaaccaatcgtctctgatgcggatatgaccattgccgacggtgaacgagtcggcttgatcggttcttcaggctccggaaaatctatgattgccaaggcgatgctggggttgctgcccctgaccgctgtgactaatgggtcgattgatatgggcggcacggaaattatcggagcttccgaacgtgcgcttgccgacctgcgcggccggtatgtgggtgcggtgttccagaatccggctgcctcgctgaacccggtgatgaccgtggcgcagcagatcgccttgccattgcggttgcactatgatctgaccaaggccgaacgagccgaccgagtgaatgccttgttgagcaaggtcgggctggatctcgatatggccggcaaatacccgcacgaactgtccggcggccaacagcagcgcgtgggcatcgccacggcgctgatcacctcaccgcgattcatcatcgcggacgaacccaccaccgcactcgactccatcacgcaacgccagatcgtggacctgctgacctcgctggtggacgacgccggtgcctccatgctgttcatcacccacgatttctccgtactcgcgcgtgccaccacccgctgctacgtgctggacgccggccgcatcgtcgaatccggacccaccgccgacctgctcgccgcgccgaccacaccacaagcccagcgcctggttgccgccgcccaaaccctcaccctccacacccccaaggaggattcgcatgagtaacagcagtgtgccgctcctctccgcccactccatcaccaaatccttcggcccgcgcaccgcacgccaccaagtcctcttcgacgtctccgccgacgtccacgccggcgaatgtctggccgtgatcggcggctccggatccggcaaatccacgctgacccgcattatgctgggcttggaatccgcggactccggcagcgtggaatacgagagccaatccattgtcggcggccgaaaatcgccgggattcgcggccctgcgccacgaatcgggactggtgttccaggacccgttctcctcgctcgacccacgttggcgagtcgccaaatcggtggctgaaccgctgagtctgcaacggcgtgacctgaacaacaccgatatcgacgagcgagtgaccgcggctctgaccatggcaggccttgaaccggcagacttcctgaaccggtacccaatcgacctgtccggcggccaggcgcagcgcgtggtcatcgcccgcgctatcatcaacgagcccaaagtgatcctcgccgatgagccgatgagcgccatcgacgtggccgcgcgcattcagatcctcgacaccttcgccgccatccgcgcggcccggccgagcaccgccatcatcatggtctcccacgatctcggcgtggtgcagcacatcgccgaccgcatcctcgtgctccatgacgggcgtctcgaagagacgggtcccaccgctgaagtgctaggcaacccccaatccgattacacccgtcagctcatcgaggcagcctcgttatagaccttttttggctccctctctgaggggagctgtcgaacgcagtgaggctgaggggagttacgggtgccgtcgtattcccctcagtccgcttcgcggccagctcccctcagggaggggagccgaggtcgccggcgacacgcgcttgtcgcgggttgtgctatggtgtgagacatgcagattatctcatgttgttgtcgctaaccgacgcccctgggcgagcggtcagtgacgcataacttgagatagagcattcgaatcgcggcaaatctgtcgcatgaattttcatgaagtcgatggcacgagcgtaaccgtgtaacgtgcgagccgtggttaacatgaaaaaccgattcactttccggcttcaccgtacagtgagcgggaatactcgatttcaaactaaagccacagtccattcgtctgggaacgtcggttcacgagcgcaacgcagcaaaaccccacaaccccagcaacgaaggacttcacatgaccatccacaacagcctcgcagaactcatcggcaacaccccactcgtcaagctcaaccacattccgcaggcggccggcgtcaaagccaccatcgccgtcaaagtcgaatacttcaaccccggcggatcctccaaggaccgcattgccgaacgcatcatcgacgccgccgaacagtccggccaactgaagcccggcggcgtgatcgtcgaacccacctccggcaacaccggcgtcggcctggccctggtcgcccagcagcgcggctaccgcacgattttcaccctgccggacaaggtctccgaatccaagcgcgcggtgctgcgcgcctacggtgccgaagtcattgtcacgccaaccgacgccggcccggacgaccctcgctcctactaccaggtcgccgaacgactggccaatacgattcccggcggcttccgcccgaaccagtacgacaatccgaacggcccgctgagccactactacaccaccggacctgagatctgggaggccacggaccacaaggtcacgcacttcgtggccggcatcggcaccggcggcaccatctccggcaccggcaagtacctcaaggaagcctccaacggcgcggtcaaggtcatcggctccgacccggaaggctccatctactccgcttcctcacgcgacgaagtccaccagtacgatatcgagggcgtaggggaggacttctatcccaaggccttcgaccggaacatcaccgacgacatcgtgcgcgtgtccgacgccgaggcctttgaaatgacccgccgtctggccggcgaggaggcgctgctggtcggcggctcgtccggcatggccgtggccagcgccatcaagtacgcgcttgccaatgatttggacgagaaccagatcgtggtggtgctcgcccctgattccggccgcagctacttggagaagatcttcaatgacgactggatgcgcgtcaacggctacggcgacatcgtggagcgcaccagcaagccctccctcgccgagcagtaccttaacggaactccctctgatgagggcgctggggacggactccataactagctatcaaaagaatcaataccaacatccgcactaactaaccgcacctgttctaccttcgaatacggaacgatcccgaaaggaacccaatatcatgtccgctgaatacaacgccaagttcgccaacaccgacatcgccactcgcgccatccacgccggccaggagcccgacccgaccaccggtgcggtcgtcacgccgatcttcgccacttccactttcaagcaggatggcgtgttgggcctcaggggaggccacgactactcccgctccatcaaccccactcgcaccagcttcgacgagcagctcgccgccgtggaaggcggcaagtacgcgctgagcttctcctcgggcttggccgccatcgacgtgctgttgcgctccaccatcaagcccggcgacaacatcctgctcggcaacgatgtgtacggcggcacctaccgcctgctctccaaggtgttcgtgccgtggggtgcgggcctcgacgtggtggacatcaccgatctgaaagccgtggaaaccgcattggcctccaagcactaccagtatgtgtgggtcgagaccccgtccaacccgctgctcaacatcaccgacatcgcggccaccgccgaagtcgcccacaagtacggcaccaaggtcgcggtcgacaacaccttcgcctcgcccgcccttcagcacccgctggccgatggcgccgatgtggtggtctactccaccaccaagtacatcggcggccactccgacgtggtcggcggtgccgtggtggtcaacgacgaggagacccgcgagaaggtcgccttcctgcagaacgccgccggcgcagtgccctccccgttcgactcctggctggacatccgcggcctgaagaccctggatctgcgcgtcaagcgccacagtgccaacgccctgaaggtggccgaatggctcgaatcccagccctctgatgtgattgagcgcgtctggtacccgggcctcgagtcccacccgggtcatgaaatcgccgcccgccagatgcacggcggcttcggcggcatcgtctccgtgcagctcgcggccggcgccgaggcggccaagcacttcgtggaccacacgcagatcttcacactggccgaatcgctcggcggtgtggaaagcctcatcgaggtgcccgccgccatgacccacgcctccgtggccggcaccaccctgcaggtgcccgccaacctggtgcgtatttcggtcggtatcgagaacgccgacgaccttatcgccgatctcaagcaggcgttggatcgtatctgaccgtactgacggtactggtggcaccgtattgacggtgccaccacgcttatcggcggactcgctatcgattggtacctacaaaaaatccccggcccacaagggtcggggattttccgttatcgattaaacatattgaatcagctggcgttgccgccctgccatccagtggcatccgcaccagccgggcgcaacgtctgaccggaagtcggtgtggtgccatcaacgaccacacgagtgccgatggtggcaaagtcgtacatccacttggcgtcggccacctgcatgttgatgcagccgtgcgagcctgggataccctgctgcacatagatggggtgctcgccccacatgtatgcaggaacaccgtgcagagcctcgccgccgttatagtaggaaacccacggcgtgcctggctggttgtagccttcgccaaccatggtctgcgattcgtacttgagatacacgtagaacgtgccggtatcggacagcatggaaccatcggcggtgggcttgccagaagcgatgttgaacttcctgaccaccgtggtgccctgatatgcagtggcagtctggttcgtcagatcaacatgaacccacttatcgccatttgccgtatcgaagttatgaggcacctcgacctgcttgacatcatacgggctgtctttcacagccacagtggaatcagtggactggttctgctcgatggcggtagccagacgttcgggggcgtccccggcgccagtcacttcaataccatccacgccgagtgtcttatcggcaccaatttccacgccgccttcgtctttcggcgtgatgtagacctcgcgtgtcaccttgggaacagtcagttctttggttacgctgtcactggtgacgtacttggtgatggcatcgcggtcgactaccagactcatggtgccttccgccttattcgccgtgggcttgaggaatgaggcaatggtatcggccgggatggtgacgctcttgttcacgccgttgtccacggtcagtttgaggccaagcctggcattggcgtcaaactgtgtttgctgtgcgctcgcgtcatcaatcggattctttgcggtctgtagcttgaccggcaccgtcgcattttcgcccggggtcgcgacggcctccttgactgcagcattgacaacattgatatccgggcccttgccgtcctgacccgcggtgtagtcgaactgcttggtgctcttgttgtagacaacggtggcaatctgcgctcggtcgacctcatcgaccaggccggcggtgacgaattgttcggcagtctctttgtccgtggtggcggtcagagcgatatgcggctgatcgaaaatattgagcttggccacgtcgccggtcttcgcgttcaacagcgcatccacggttttatccgtgtcgacggtgacgccaaggtccttcagcgaggctttgacgctgttgccttcggcggtgaacgtcaccgtggtgttattcagccgctgcttcacagtattcgcaagttcttcgcgggtctggcccatgacagagacgttgcccaaatgaacaccgggcgcagccttgtcttggaagtaccaacgtccgacgaagaaataggctattaatgcggcaagcaacactgcaaatatggttatgatggcaatccgtgcggccttgccatgtgatttagcggtggcagatgccataacatgttcacccacataggctgtattgtcggcatggttattggtgccactgtcactttgctgtggtgtggcggtacctgaatccgcggctgcgaacagcccatcggtggccacaggctgcagcaccgccgtctcctgatcgtcaggagaggagaaggaaaatgtatcgttggccatcaaaatgccccgtcttagttctctcaaagcggcatatcatgcgatatgccgggaataacgttccttgacgcataataatacggaagggctacgtacatcgttgcgaggtattccgttatacgatgaaatccagccgcggtcggcctacactggtcgtttatgacagcacatcaggcggcgctggaggcgctcacacgatacttcggctatgactcgtttaggcccggacagcaaggaattgtcgaggctttgcttgccggacgcgatgtcttgggcgtgatgcccaccggcgcaggcaagtccgtgtgctaccagattcccgccgcgctcagcccgggtgtgactttggtcatatctcccttgatttccctgatgcgcgaccaggtcgatgcgctgaacgacctcggtctgccggccgcgttcatcaacaccactcaaactcccgacgagcaggcgatggtgttcgcccaagccgccgccgggcagatcaaactgctgtacgtggccccggaacgcttggaaaccgggcgattccgcgactttgccgcccgtacgccgatctcgctgatcgccgtggacgaagcccactgcgtctcccagtggggtcaggacttccgctcgtcgtacttaggtatcggcgatttcatcgccgggctgccgcagcgtccaccggtgggtgcgttcaccgccaccgccaccgaacgggtgcgccgggacatcgtgggactgctgggattgcggaatccggccgtcaccgttaccggattcgaccggccgaacctgtattttgatgtggtcaaactggaaaccaaatacaaggccgcatgggtggcacggtatgtggccgaccatccggacgaatccggcatcgtctactgcgccacccgcaagaccaccgaagcgctcgccgacacgctgaaccagatggggcatccggccgtcgcctaccatggcggcatgtcgccggacgcgcgtgaggcggcccagcgcgacttcatcaccgacaaggtgccggtggtcgtggccaccaacgctttcggcatgggcatcgataagtccaacgtgcgttacgtcatccaccacaatctgcccgaatccattgaggcctactatcaggaggccggccgcgcgggccgtgacggcgagcccagccgatgcacgctgctgtggaatgagtcagacatcgtcacccggcgtcggttgctggataacgattatgagaacgagcgattgactcccgaagagcaggaaatcgttcgccagtccaagcgccggctgctggacggtatggtcggctactgccgcaccaccgactgcctgcaccggtatatgacccggtatttcggtcaggaattgtcgccgaatgctggttccacggcgggtgaagacattgcggcggactcttcgcagtccggcaaatgcggtgcctgctcgaactgcgaaagcacgttcgagaccatcgacgtgacccgcgtggcgcaggcgatcagccgttgcgtgcatgacgtggggcagcgcgtcggttccggcaagatcgtcaagatcctgcgcggttcgcgggcacaggatctggcatggctgaacccggagcggatgcccaccttcggcatgctcaaggacgtgaacgaggctcgcgtgcgcgacgtgttgagtcagatggccacggacgggtacctgtcaatcgccgaagggcgtatgccaatcgtcatgttcggtgcgcgggcggccgaaaccgccgctcccgacttccactatgagatcaaacgggtggaacgcaagtcggcggcggccggttccggtcggagcgggggagtggctgatactgccgatgccgccaatgttcccggcgatgcgctgggctcgtatatcccggacgatgacgaggaatcgctgttccagaagctacgcgaactgcgacgcaccatcgcccaggaaatcggcaagccgccgtacatcgtgttctccgacaagaccttgcgcgacatggcccgcatcaagccggttaccaatgcgcaatttctggcggtcaacggcgtcggtcaacacaagctcgacctctacggccagcgcttcatgcaagccatcgcctcgttcaatgccgggagtgcgtcataacaatctcctatagcgaactgcggagtatttgcgggcgttcttgggctggctcgactacgatgactgttcgatgcttcatgaccgaacactcagcaagtagaaaggcaacagcatggcagaagaaacggccgaaaagcccgtcgtcgaatcattccagcttgatcacaccaaggtcaaggcgccgtacgtgcgttacatcgacaccgaaacgggccctcacggcgacgtgatctccaactatgatctgcgcctgacccagccgaacaagcaggccatccccaccggcggcctgcacaccatcgaacacaccatcgccgtgctgctgcgcgaacgcattcccggctacatcgactgctcgccgttcggctgccgcaccggcttccacctgctgacctggggcacccaccccaccgaggaagtggccaaggccttgaaggaatcgttggagttcatcgcgtacaaggccacgtgggatgacgtgcccgccaccaccgagaagagctgcggcaactatcgcgaccacagcctgttcaccgccaaggaatgggccaagcagatccttgaggaaggcatcagctccgacccgttcgagcgcaaggtcgtctgatcgcaagccaatcggcatggaagaaccccgcccccgcataccacgcggacggggtttctttgtgcctatggcatggtaggtttgccgtcagttaatcgttggccgctgcacatcggtagcctggcatgttggagaggtggaagtgactcagtcgaacgctgcaaacaaggcgacaggccgccgtttccgccacgccaccatgcgcgatctgccgcagatgcagaaaatctacgcacgcgcacgcgcgttgatggccgccaacggcaaccccacccagtggggcaacgaatttccgcgtgaatcgatgattgaggacgacatcgccaaccagcgtacgatgctgctggtcgacacctgcaatggccacgaacgcattctggcccagttcgccctgtgcccgggcgaggatccgacctacgccaaaatcgacggcgcctggctggacaacgacgcctatgtgaccatccaccgcatcgccgcatccggtctggtgcgccacgcggcccgcgactgtatcaggtgggccctgaagcactacggcaacgtgcgtgccgacacccaccccaataacaaggccatgcagcacgtgctcgaaagctccggcttcgcccgttgcggcctgatccagctgctcgaccggccggtcgacaccaccagaatcgcctatcagcgccacgagtggtgagtgtggctgccggctgatgtgctcgtttctgcaccgtcatcggtttctgacggtagaatcagtgtgtgagaagaacacgttgggtcgggggcgtcgtgacggtgcttgcggctgtcatgctgtcgtcgtgcggcggcgtccagtcgaatcccgggtaacacaccgttgccaatccattcaccgcgcaggtgaatggagaagacatggcgatgcctgtcggccgatgaagccccatcggccgacaggcatcgaggaagtcaccgtggccggcggaacgcgcggtcgccgattggggcgaatggcttgtgtggttcgctttggtaccagtaggcgaccgtggccacgtcgtcctgtcgttcgaagttgccggcttcctcggtgccgatctgctgccattcgacgcgcaggtctcgctcgaagtagatcgggtcggggatgtgccaacggtataggccgcgggtcacgggggtggcagtgtcccagtaggcgctttcgcgtccggcgaggttctgcgagtagaacgggaagccgaggtatgggccggtgaaggtgcgctcgtacatgcggccgtgttcgtcgaattcggcgaagctccaggcaccgccgaagtagtcctcggcgccggtgctgcaccaggtggggtatttgccgtcgccgtcgatgtagaacttgaattcgccttcgccccaccagcggctttcgagcgcggtgagcgccaggtaggtgccgacgtaggtgccgtgtccttcgacgccatcgagcaccacgtagtcgtgggcgagttcggtgacgcgttggcggcgccactgcgcgtggaagcgcatcgtgtcggccggcagctggtcgtattcggtgtagtcgatttggtagaagaacgcgggcacgtcctcgttgtggtcgttgcgcagcacgatgcgcgcgtgttcgaacggcatggcgaagtagcagttgaagccccggttcgggttgaccatgacgggaattgagttgatggtgcaggactgggcgtgtccgcagcagaagaagtcgccgatcgggcattgcaccgagggggagtcctcgccgtcccagtagaattccaggatcaggttgcgtagcacgtcggggccggtgggggaggtgcggtcggttaccgtcatccagatgtgacggatcacgccggggccctcgacatccatcaaagtcaccgattccccggacctcaccgtgctgatgcaggggcttcccttgcgggaggggcccaacgcgctggccgccatggccgcgcggcccttgccgccgtccgggttttcggcgttgatgcagcgggtgcggccgggtgccctcatggccacggcatccaaggcgccttgtccgagccccggcgcggggttcgctgtggtgaatgcgtcgagcatgatgcttacttcctttcctgtcgcaggcccggcccgccacggcgttttgtctggggcgggctgggctgctggggggtgttatttcacggcaccggcggtgatgccctaggagagcttgcgctggggtagtgtcctatatcttgtgcactttggtcttcgcccgtccctgcggcgatgatcggttcgcttcccatacggtctcaccgagtcttgacatgtcgaggtagcggcgcgtcgaccactcgttcgacgtgacatagcgcacgcgcgcgcagacgagcatcaacgcgctgcgtccgtcggggaagctgccgaccacgcgcgtgcgccgtctgatctcgcggttgcgggggtgaccctggcgaggacgttgcgctcgaagcggaccatgcaccgctggtagcgggcatcgcgttcaaggcctcctcgacgctttttctgcccatccggtccagggtggtctccggcatggcctcatatcgcaaaaaccgtacgctgaaagtaactcagcgtacggttttcacgaaagcagccatcggctatcggtcagccgatagacctcagtcctcagtcgcagcgaccttggcgtcagccccggccttctgctcaaggccgagcttggagcgcttgcggctgtagccgaagtacacgatcaggcccagaccgaaccagacggcgaaacgcacccaggtctcccagttgagaccggcgatgagcacgaagcagaatacgatggccagaatcggggtgaccggcacgcccggcgcgcggaagccgcggggcgcattcggctgggtcttgcgcatccatagaataccggccgacacgatgatgaacgcggacagcgtaccgatgttcaccagctcgaacagcacgttgatgttgatgaagccgccggcgaacgcggtcagcagaccgaagaaccaggtgcccttgaacggggtgcggtacttctcgtgcacgtggccgaagaacttcgggaacaggccgtcacggctcatggcgtagcagatacgggactggccgtacagctgtacgagcatcaccgtggtcatgccgatgagggcgcctaggttcacgatcaccgcgagccagttcatgccggtctccagaatcacgccggccaccggggcgtcgatgtacttggcgaactccttgtagggcaccacgccggtcatgatcatggtcatgacgatgtagagcacggtggaaacggccagggacagcaggatgccgcgcggcagtgtcttgttcgggttgatggtctcctcggcggaagaggacacggcgtcgaatccgatgaagctgaagaacacgatggatgcggccggcacaatgccgtacggctgggtggagccggactggaaagtgtagatgccgtacggggagaacggctgccagttggacggcttgacataccacacggcgcacacgatgaacagcacgatgatggcgagcttgatgagcaccatcacgtcattggtgcgcttggtctggttgatgccgatggagagcacccacgtgatgatgagcacgatgacgaaaccgggcaggttgaagtaggtggtgacgtccgggttggtgccgtaggcggcggtcagctcgaccggcaggtgcaggccgaagccttccagcagtttgttgaagtagcccgaccagccggcggacactgtggccgcctgcagggcgtactccagaatcagatcccagccgatcacgaaggcgatgagctcgccgaacgccagataggcataggagtaggccgagccggacaccggggccatggcggcgaactcggcgtagcacagaccggcaaaaccgcagcagacggcggccagcaggaacgatacggacagggccgggccggcggtcagcgcgcccttgccagtgagcacgaagataccggtgccgatgatcgcgccgatgccgagcatcgtcagatcgaaggtgcgcatcgtgcgcttgaggggagtggattcggcgacaagctgatccacgcttttcttacgaaacagatccatgttcttctctcatgaaatctaggattatggggctgaaccggacggatttccgggatcccggcacgcctcaacgccgggaatcaaaggcggcttccgagaaaccgcatatcggtcattagtgtacgactgccgggcgaaaacagacgattgcgactacacgtcacattctcgcgcaacaataggtgtctatgagcatgaacgcagcacctgaaatcgcattctcgtccgagcagggcaaggccaactatgcggccgcccgccgccaataccccgcacaggccatcgtggacctcaaaaccatgcgcgacaacatggcccacctggtctccgtggtcggcgggcccgcttccggcacggcggtgatgggtgtggtcaaggccgacgcctacggccacggactgctgcccgccgccctggccgcgctcgccggcggcgccacatggctcggcaccgcgcagtcgcacgaagcgttgctgctgcgcaagctcggcatcggccccgaccgctgccatattttgacttgggtatacaacggcaccgaagtcccgttcgacgagctgatcgccgcagatatcgacgtatcggtcggctccctgcccggcatcgacgccgtggccgccgccgcacgcaagctcggcaagcccgcccgcgtacacgtcaaggtcgattccggcttcggtcgcaacggtttcacaccggccggattcgacgccgcgctcgccaaactcgtgccgctcgccaaagagggcgtgttgcatattgtgggtcagtggagccatctcgccgtggccgattcgcccgatgtgtccgaattcgtgtcctccaccgaccgccagatcgaaacattcaaggacttcacgcgccgcatggaacaggccggcattccgccggagatccgtcacctggccaacacagcggccactttggaccgcccggagattcacttcgaactcacccgccccggcatcggcctgtacggctacgagcccgatcccgcgatgggcaccccgcgcgactggcatctgaccccggccatgcgcctgcaggcgcagctcggcacggtcaaggatgtggaggccggccacggcatctcctacggccgcacctacctgaccccggacaacacctcgaccgctattgtgccgctgggctacgccgatggcatccaccgctccgcttccggtttcgatatggaaggtgccaagcacgtggagaagccgggcggcccggtgcgcatcatgaccaccgaaggcccgaagctctaccgcgtgtgcggccgcgtgtgcatggaccagttcatcgtggacctgcacggatccgccgccgaactcggcgttcacgagggcgacacggtcgaactgttcggcccgggccgcggcgaggattacgttgagcccaccgccgacgattgggcccgcgccgccgacaccatcagctacgagatcttcacctgcctgcgcaaccgcatcccgcgcctttacgagcatgccgccgaagtactgcccgccgccgacctcgccaaactcgaccccgccacgctgctatagcggctgttgatcgggctgtttgtgtctccgctgaggtgatgtggcgtaccgaagacatctgagcgtacggttttcacgaaatggcccttaagttcgtgaaaaccgtacgctgagtgctaataagcgtacgttcttcacgaactcaaggataatttcgtgaaaaccgtacgctggcaatcgataatcggcgaataggatattcgactgccgaatgacaggcatatcgtgactaatttcacggaagtaatcccgtaattcggctggattcggacgaaaggcctctatgcttgggttatggaaacaacgcaggatggggaacgggtgctgagcgacgaggggtacagcgcctttgatgaggaacgctgggcacctgagccgcccaaatccaagtcacgcaccgcgttcgagcgcgatcgcgcgcgactgattcattcgtccgctttgcggcgtttgggcgcgaaaagccagattctgattgccggtaccgacgatttcgctcgcactcgactgacgcatacgctggaagtcgcccagatcggtcgccaaatcggcgcattgctcggctgtgatccggacgtggtcgactgcgcctgtctggcccacgaccttggtcacccgccgttcgggcacaatggggaacgtgcgctcgccgacatcgccggcaatatcggcggcttcgaaggcaacgcacagaccatgcgtatcctgacccggctcgaacccaagatctttcacccggacgggcgttcggccggcgtgaacctgacccgtgcggccttggacgcggccgtcaaatacccgtggaccttggccgaagccgaccaacacccaaagggggagcggtcgaagaaattctgcgtctacccggatgacgagccggtattccgatggctcaagatcggcgcgcctcaggctaccaagcccatggaatgccagatcatggacctttcggatgatatcgcctactccgtgcatgacgtcgaggattccatcgccaccggcgcgttcgatccgattgtgctcgccgatccgaagatgctggaccacatcatcgagcagacgcgcgcatggtatggggcgaagtgggatgccgacaagctgctggccgcgttcatgcgattgcgccgagagtatttgttccctgcacatttcaatggttcgcgcgaatcgttggcacagcttaagaacattacgtccgatttgatcggccgcttctgctggtcggtggaaaccgccacgcgcgacacgtacgggcccgggccgttgacccggtattccgcgaacatcgtgattcccgagaacacgaattacgagatcgtggcgctgaagggcatcgccgtgtacttcgtcatggcgcctcgcgagcgcgagccattccatcaggaggagcttaagatcgtatcggatttggtcgatgtgcttatggctgattcgccgctcccgtccgacgctttggaaagccagttcctggccgattggaacgaatccaccaacgacgacgaacgactgcgcgtcgccatcgatcaggtcgcgagcttgaccgacaactccgccctggccctgcactccattttgtgctgagggcgtgttgggcgggcgcttccctcagtctcgctgcgcgagccagcttccctcgggtgaggggagctgtcgctgtaggcgactgaagggagtttcgcggaagaaatgatgaccgacggtaaaaatttaccgtgtctcaggtgaggcggtactctagagacttatggtcggaatgattaagaaggaagatgtcgagaaggtgcgcgccgccgcggacctgtatgacattgtatctgcgaccgtaacgcttaagccctccggcaccggcaccttcgtgggcttgtgcccgttccacgacgagaaaaccggcagcttcaacgtgcgtccctcgctcggcgtgtggcactgcttcggctgcggcttgggtggcgacgtattcaaatacgtcgaacaatccgaaaacatcgacttccgcgaagccgtggaactgctcgccgacaagtaccatatcgagctgcactacgagaacagcggcaatggcccggcgcgcgagaacaccggctccaagcgcacgcgactgctggaagcctgcgaggaagcccagcgcttcttcgtctcccagatcttgaccaaggaagcactgcccgcccgcaagctgcttggcggccgcaacttctcccaagctgattgcgaacgtttcggctgcggctacgcgccgcaaggctgggataatctcgtgcgccacttggcctccaagggatttacgcagaaggaaatcctcgacgcgggcttggcccgtcaaggccagcgcggcatctatgactatttccgcggccgagtgacctggcccatccgcgattcgaccggccgcacgctcggcttcggcgcgcgcaagctgtatgaggacgaccagatcgccgccaaatacatcaacacgccggatacgcagctctaccgcaaaacccaggtgctttacggcatcgatttggccaaatccgccatcgtcaagaagcggcaggtggtgatcgtcgaaggctatacggacgtgatggccatgcacttggccggcatcgacaccgccatcgccacgtgcggcacggcgttcggcgccgagcacgccaagattgtgcgccgcctgatcgccgacgattcgctgggtgcggtccagctggtcgggccgttgaaggtcaaggaccagccgttgagctcgcgcatcgtgttcacgttcgatggtgacgccgccggccagaaagccgcgctgcacgctttcggcctcgattcggccttcctctcccaaaccttcgtggccgtggccgacgacaatctcgacccgtgcgacctgcgcatcgagcgaggcaacgaagcagtgcgctcgctgatcgcccgtgccaaaccgttgtatgacttcgtgattgacgccgccatcagccggttcgacctgacctacacgcccggccaagtgggcgcgatgaaagccgtggccccgctggtggcgcagattcgcgaccgctccctatgggacgcttacgcgcgcaagtccgcgggccgtatcggcgtggaccttgaggtgatgcgccgcgaggtgatgaacgcacgccggcagatgcatgtacgcgatgaggacgcctacgcgcccaaacgtcgattcgagcgtgacgagccgcgtgtggaacccggcaccaacccatacgccaatccggccacgcgcaaggccttggagcgccgtgacgccgccgaacaggcatatttcaagatcgacgacgccgtattcatcgccgaacagcagttcatggccgtgctgattcaggtgccgcgcgccatcgaccgcaccatgttcgggcagctgaccatcgagcatttcatgacttcggtgttccgcactttgttccaagcgattgcggcagctggcggactgccatccgacgataccccgcaggggctgtggatgcacaacctcaccaaggccggcgggccgatgctcaatcaggtgatcaacgagctggccgtcatgccgttgccactgcctggcgacgacaccgatagcggtgcgcagccggtgcaggccaacgtgtcgggaggaggtgttggcgtgaatggcggtgccgccgcagtacagctgcgccctgccacgccggaagagcagcgctatgccaccgagctcctcacccgattactggacatgggcttcatgcgccagatcggtttggccaaacgccgcatggcccaactgcccgacggcgaagagaagataaccctcctcggccaaatcgcccgcatggaaaccgcccgcaaagacctccaagcccaaatctacggcaacaccgttggctagtaatctctccctctgacgagggaggttactggccgcagtcgggcggggcgagagaagcgacgtcagatatatcgcgcagcatcgatgtcacatcaactattcgtttgatattaactttcccgatgtctatttagaagtgcaacacccttgttggtcctgtaattctaacagttcgtcggcgaacgcctcggcgggcgtccggtagccgagcacgcgcatggggcggttgttgatctcgtcgacgatctccctgacctcctttgccatgtccatccggatctcgcagcgtttgggcagataccggcggatcatgccgttgcggttctcgttgcttccccgctgccagctggagtacgggtcggcgaagtacgtggccatgcccagcccgtcgcgcagcctttcgtggtgggcgaactcggtgccgttgtcgtgcgtgacgctgacgcgcgcgccggccggcagcggcgagaacatgtccagctgcgccccgacgctctcgccggcggtcttgtccggaacgacgcgggccatgaggaacctggtcctcctctccacctcggtgtgcaggttgcatcccactccgatgacgctgtcggcctcccaatggccgaacgcgctcctgccgtcggcctccggcgggcgttcggagatgggcactcggccgggaatcgggaagcgcgacgtcctcctgccgccgtgcctgcggcgccgcctgtgccctcgcggcaggcaccgcgcccagcgttcccgaagcggcctgctggagtagacccatcggtagatggtctccgggcacacgcgcatgagcgcatcgtccggccacaggacgcgcagcctgccgctgataagcagcggcgaccagccgcggcccagccattcggccacctgcgcccacaggcggtcgtgcgacagccggtagggctttcgtggcttggatctcctgcggtcggccttgcgctgcgcgggcccggcgatgtagtagcggccggtccatggccccgccttcagtcttttcggccggtacgggcggtacgactcgttctcgttggacgggaaccatgtgttgcgcttgatctcccggctgatgctggacgggctgcggcccagcatcgcgccgatcccgcgtatgctggcgccgttgcctacctcgatctggatgacctggcgttcctcttccgacaggtgcgaatatacttctcccataggtgcgacatcccttcggactggttttctaggcaatttccaatctaacgggtgttgcactttcatttagacaacgggtttttaatgacaaacgataaattatggtataatgcaagtatgagttgcttggtttgcgcaatgaagcggaggctcaatcatggcaacgacaaagaaactatccttcggtttggataaggccggtggcgcggccttgatcctggcccgcatcggtgccgcgctcctatggatcatcgcagcgctcgcggccgtggtgtgggtggtattcctcatttccccgcgctcgttcgccgcgaacttcggcagtgtcgacctgaatgtcggcggcgcgttcaccctcagcatcaagggcgacttgttggactactcctataatctgcagaacttccacgacggtcccgtcaacatggtagctaccatctccaccggtctggcgagaatggtggtctacgctctactggccttggcgttctccgaaatggccgcactgtgcaaggatttgacggtgtggcttgcagacggcagggatgccacgcctttccaaggcatggtgtccgaccggttgaacagggctggctggtatctgattgtcgcgccgattgtgggtctggtgaacttcatcgtatgtttcctggctggcacgggcggcaactggggcttatggatgagcggcatgatggtgatgattggcattatcctgttgctgattgcgcgcatcttcgattatggcatgggtctgcaacgggaagtcgacggtctgctgtgagggggaagagcgccgtaggcccgcgtggcgccggtccgaacagggccggtccgaacaccgagggcccgaatgaggacagcctgaacatcgttgattcgagcgagaccggcctgaatacggctgactcaaactccaccggtccggccggcataggccatatcgtcctgcgcctcgaccgcatcatggtcgagcgaggccgctcactcaactggctggccgatcaggtgggcatcaccaacgtgaacctttccaaaatcaaaaacaatcgcgtttccgccatccgcttttccgccctcgccgccatctgtgcggcattggattgccagcccggcgacattcttgaatatgtggatggcatttcgggcgatgcggacgatgcgaatagcaagtaatcgcacgcatgccaactcttctcctcctggcctgtgattgattgacaatcagggattacatgccaaatgggagagataaacatgtggaggttggattggatgggtgcagaagttgcgaattggccccatccaaattggactggtttgggtggggccaatccactccgttcaataatgaagcgcgataccaagcagcgtcgaacgaagggaaactcatgacgcagaatcgtgcggaactcaaccgtaatttggcccagatgctcaagggcggcgtgatcatggacgtcaccacgcccgagcaggcgaagatcgctcaggacgctggtgcctgcgcggtgatggcgctcgagcgcatccccgccgacatccgtgccgccggcggcgtttcccgcatgagcgacccggccatgatcaagggcatccaggaagccgtgtccattccggttatggccaaggtgcgtatcggacacatcgccgaggcccgcattctgcaggccatcgaaatcgattacatcgacgaatccgaggtgctttccccggccgacgacgtgtaccacatcgacaagaaccagttcgatgtgccgtttgtgtgcggtgcgaagaacctgggcgaggcgctgcgccgcatcgccgagggtgcagccatgattcgcaccaagggcgagcccggcaccggcgacgtgattcaggccgtgcgccacatgcgcaccatgaacaagcagatccgcgaacttgtcggcctgcgcgacgacgaggtctacgaggccgccaagcagctggccgtgccctacgatctggccaagtacgtgcacgacaacggccgtctgcccgtcgtgaacttcgccgccggtggtgtggccaccccggccgacgccgccctgatgatggaactcggtgccgaaggcgtgttcgtgggctccggtatcttcaagtccggcgatccggccaagcgcgccgccgccatcgtcaaggccaccgccaactggcaggacgccgatctgctcgccaagctgtccgaaaacctaggcgaagccatggtcggtatcaacgaggacgagattcagaccatcatggccgctcgcggagagtgacgggagtcgaagccggagaggacaacatggttgtagctgttgaatacatttccaaagaagaatccgcagacgccgaaaccgccacgcacggcgtgaccggtattctggccgtgcagggcgcgttcgccgaacatgcggcggtgctcgacaaactcggcgccccgtggaagctgttgcgcgcggccgaggatttcgatgaatccatcgaccgggtcatcctgcctggcggtgaatccaccacgcaaggcaaactcctgcgttccaccggcctgttcgagccgatcgccgcccacatcaaggccggcaaaccggtgcttggcacctgcgctggcatgattctgctggccaagaagctcgacaatgatgagaacgtctacttcggcgcgctcgacgctgtagtgcgccgcaatgcttacggtcgtcagctcggcagcttccaagccatcgctgatttcggccaagccgacgacccacagcgcatcgcggactttccgctggtgttcatccgtggaccctacgtggtgtcggtcggccccgaggctacggtcgaaaccgaagtcgatggtcacgtggtgggcctgcgccaaggcaacatcctcgccaccgccttccatcccgaactcacggacgacgtccgcatccacgagctcttcctgtcgctgtagccgattcgtctgccgttagactggtattcgaccgacgaatcaaggagacgatctgccatgcagttcacgctgaaccggcgcagcacggtgccgatgtaccggcagctggctgctgagctgcgtgaacagattgtctccggcgcaatggctgagggctatcgtctgccgcctgaacgcgagttggcctcacgcctcgaggtcaatcgcaccacggtattacaggcctatcagcaactcaaagatgagggactcatcgcctccaaagtaggcaaaggcacgttcgtgctgccgttgcagcatattgagactgcccggattcctgtagtgagacatgagccgattgacgaggagccgaaaccgagcgttgtgcggccgccgtggtcggtgttgttctccgactattccaaccgattcacctaccacgacattgcctcggccgagcgggcgcaacgcggcgataccatcatcgactttgccaccggctcgcctaatccggcggatattcccgacgatttgttgcgttcagtgagcattgaagcgtttgagtcgcgcgaattcgacggtcagccagaatcgcctatcgaaggattcgatgaactccgcgcattacttgccgagcatatgagcacacgcggcgtgcagtgcgatgtacgaaacgtgatggtgctttccggttccgagcaaggcatcgatcttatcgtgcgtgcattcgtcaatcctggcgactgcgtgctggtcgaacaatccacgttcttcccggcattgcagaccttccgctcggcggatgcgcgcatcatcggcgttccagtggacgagcacggtatgcgtacagacctgttggacggctattgcgcgcgattccggcccaagctcatctacaccgtcccgacgttccaaaaccccaccggtaccacgctgccgcccgaacgacgcagcgaactcatcgacgtggcgcggcgctatcagtgtctgatcgtggaagacgatgcttacggcgatttgtggtacggcggggaatcgtccgacgcacatcgccccataccgcttaagggcatggagaatgcgggatacgtgatgtatttgtcgacgttctcgaaaaccgtcacttcgggcctgcgcacgggatgggttgtggccgacccgcatgtgattaaccggctggcggctctgcggcgcatggtcgaccagcatacgagcacgtcatcgcagcgcatctgcctggaactgcttaaagaaggccgcgtcgccgaacatttgcgcggtttgattaaggcttaccgcattcgacgagatgcagcaatcgcagcattggagcggtatgcgccggatgaagtgtattggaccgtgcctgcaggcggctactatatttgggtttccttaccggacggcgtgcgctctctggatgtattggaatcctgccgttcccaaggcgtcacgttcatgccgggcagcgtgttcgacgttgacgaaatggatgattcccacatccgtctcaactttgtgcgcccggatgctgctgacattgataccggcattcgaatcattggcgagacgatagcacagatgtagccaagtgactggctcattgcggttgtcgagtttttttgatggctgcatacccacatcgatgggtgcattcgacgaatgaataagcgaggaagccatcatcagttcgctgtggcatgcgcatagcgttgtcgggcgaacggggcagaccacgtggtcgttgcgtgacctggccgatcgagccggcatcgcattgcccctggcgtagtggcgaggtggcgcagtaacgagtcacgccatcgcgagccgatgatgcgaaatgcggaaccggtcgcggccatcaacggctatcatacatgcggaagcaacgatacgttggcgtcagcacatccatctgactccagaaagggacacgatatgaccacatcctccgtttcgccggtgaccactgaactggcgggcagcgaaaccggcatcacgcttgtcattcacgccggagcgggcagtcgtggcaagcacagcacgcctgaacgcatcgcccaggtcgaacttgatctgcagcgcgccctcgatgccggataccagttgttggaatccggagcaccggcgcatgaggctgtggtcgccgccatccacgtcatggaagacgctcccgaattcaacgccggccgtggtgccgccctgaccagcgatggcatcgcccagatggacgcctgcctgatgaccggcgatggcgaggtcggtgcggtcaccggcgtaagcaccgtgaagaacccgatcgatgcggcgcgtgccgtcaaagagcagaccaagcatgtgctgttcgcggacccgaccgatgccgagatcgccgattggggcgtcgcgaccgaaagcaacgagtacttcatcaccgaacagcgtcgtcagtccttggccgaggctcagtccggtggcgatgagtgggagaagcatggcaccatcggtgccgtggcgcgcgatgccgagggcaatatcgccgctggcacgtccactggcggcatcaccaaccagatgcacggtcgtgtgggtgattcgccgctgcctggttgcggcacgttcgccaaccagtccacggtggcggtgtcctgcaccggcatcggcgaggcgttcatcaaggtggtcgccgcccatcaggtgtcggatcgtgtgcgtttctccggcgagaacgtcgaggatgccgcgacggccactttggacgaagtcgccgcgcatcatggcgatggcggcatgatcgttctgccggcggtcggccgtggcgtggtcgcctacaacagcgagatgatgaacttcggataccgtagcgcgcaaggaggtaaggtgcagggctgattgccccctgtattgcggcatatatcataatggccggtgtgctgcggattcttggtaaggaatccgcagcacaccggccattcatgtatgcggcaagtgccgccgatcagtgcggcagtgcgcgctacttggtgatcgtgttgtacgtgggcatgttcgtgtaatcgaactgcacgttcttcacgttctgtgcagacacggcggcgaaacgtttgaccgggaatactggggtaatacgcaacttcatcgctcctcttcctcgaatgaaactatgttccattggtatgagccagccacgtacggtattcgtgtctggcctgccacacaatgatgcagccgtatatacgggcacagcattgcgcggcagttcattgtatggaagacatgcaaactcaatgtttccttgtccaaataaaaaaacgagcgcggctgatgtgcggcaccggtccaaaaactcatgtccgccagcgcaacgcgactacgtaccttatgctggtctgcgcgtaaaatagaatggttgcgatattgggttattcacggaggaatggatgcgacgctggctgatcaatgtagccaaaaatgagacgattctcatcgtcgccgcaatactcgccctgatttcgtgtttcattgtgccgccggacgccgattacaaaagctacattcacgccagcaccatcagccagctcatctgcctgatgattgtggtgtgcggattccagcgtatcggcgtgttccgcatcatcggttcgcgattgctggagaaggtcagcaccatgcgcggactggtcattacgcttgtcgctttgacgttcttttccgcgatgttcatcaccaatgacgttgcgctggtcacgtttgtgccgttcgcggtggccgtgctcatcatggctgggcaagaggataagaccatcctcgtggtcacgctgatgaccattggcgcgaacgtgggcagtatgctcaccccgatcggcaacgcgcacaacctgtatctcaaagccctgaccggcatgccgaccatggaattcctcggcatcatggcaccgtattccggcacggcggccgtgttgctggtcatcgtgatttccgtggtgtttggcggcaaaccggtcggcgacctgggcgacctcgaaaccggcgtgctggctcccgagcgcaacaaacaccagcccgacgagattcgtatcaccggctacggcgccggttatggcggctggcgcaccatcgtctactcgctgctgttcatcgtctgcctactggccgtctccgacgtgattcccctgtgggtgatgtgcgtgatcgtggtcgtcgtgttcctgttcaccgatcggcgcgtattcaaatacgtggattggggactgccgctcaccttctgcatgttcttcatcttcatcggcaacatgaagcgcgtgcccgaattctacgaactggcgcgctcgctggtcggcggccatccgctggaggtggcggtcggctccagccaggtcatcagcaatgtgcccaccacgattctgctttccggcttctgcgaccaatggcgcgatctgatcattggcaccaatttgggcggcatgggtacgctcatcgcctcgatggcctcgcttatttcttacaagaacgtcgtgcgccaatacccgcacaagaaaggccggtatctggccgtctactccgccgtcaacgttctgtttttggccgtattgctgaccttgagctggatcatcgagccgagtctctgagccgccgttgtgggttgggccggtctaccgcgcgtatacggtgggggagccggtcagtcggctcatggccgactgcgggatgtcgtggatgcggccgatggtggcatccagcgtggatacgccggctgcggtggctgtgttggattcagaggtgatgctggatacgccgactgcggacgatgatacggacgcaaccatcggctgacgataggcgttggagttgcgggccagccgggcgagcgcaggacgctgcctgcggaacagattgataaacataccgcacactccttcatcgttggccggcggtcttctggccgccgtggattccatcctgccctcctgcgcttgtattcgctatgggggatagcccctattattccctgaatctgcacgattccccctcatccttgagggtgattctaacggcaaaggcatcggcctaatggccgatgccaatcagcgcgaaaccaccagcgtgacgctgtacggcttgatcttcatcgccagcaatgaagacggcgacggcaatgtgtaagcccgacgttccggcacaatcgcccccgaagcctcgccgcggtatccgatagtggtcttcgccgtcggattggcgcttaacgtcgtcacctccaaacgcaccggtcgcgatggcgaggcgcccagcccggccagtccgcgcgcgatttccaacgtcacatccaccggggaatcggagatattgacgattttgatgtaacggcaggcgtcatccctgtcatgcccggtggcgctgacatacagatgtttggcggggcgtgacgcggtctgctcgatggacacggcatacgtcgtgtcgcccagatgcgtggaaaacagccgctccacctcataattcaccgtggggttcacatgcgccggattgaattcgataagattctgcgcccaccccttagccggaatatgcgcgagcagcggcgcataggaggtcatgcgcaccacgtcggaattgcgctcgcagccggtcaggaacgcggcctcgccgagtgccgacttccacgtgttcgcgccttgttcggtctgtggttggccggcaaaatagccgttggctgaatattcgccgaaatagacgccggcgccacaacgcgggtaagcgtcgaatcgtgacgcctgggatgcaaaccattcgggggagtggtaggaatgctcgtcgacgataatcgcgtcaccggtggcggaatcatgtgccccggaatcggttgcggccaacgctcgcgcatggtcccagctgcgcttcatcgccggctggaaggggaacagtccggcgctcatcacacacagcatatccgggtatcgttcatgaatggcctcgctgatcatgtcaaacttggccacgtagtcagccccgaagttttcgttgcccacgccgatcatgtccaagccgaacggctcaggatggcccatatcacgccggaccgcggcccacgagctggactccggatcgccattcgcgaattcgatgaggtccaggtagtcctgaatcacattgttgcggaaggtggccgaattgatatccatgtggcgcggatctcggccgggcgactggcatgcgatgccggcgaacagagtaggcagcggcttggccttgaggtcctcgcacaggcagaaatattcgtagaaaccgatctgatagctctgcgaatagctggaaccatccggcatcttgaacgaccacatcgaatactgttggcgtcgcgcggccagagagccgacggtatccttccagcgatactcattgccgggcgtcacaccttcgacgatgcagccgccggggaatcgcagaaacgctggatgcaacgcctgaatggtctccaccaaatcgcggcgcagcttgccgtaacgccatttcgggtcgcccgcgccccaatagtccgcatccatgaactgcaccagatccagatcgaacgtggtgcgttcgccggcgtcaatggtgatacgcagcttgccgtaatcggtgttcagtccggttacgtcggcgttgaaccggtaccagccgtcacggccgatgacgatggcaccatccgacgaatccggactgatcgaaacgccggaatcctgcgcatcggccccatcgtcctgcctcagaccggtctcttccgtatcgtcaagcggatcggagtccacgatatacgacaatcgagtgatactggtgagcggcaggccgtacctatcgaccacgccgacggacagctcggcccgcccatgaaccggacgtaccgcgagactgacggaataggtgtggtcggcgacgatggagaacgcgggctcgcccccgttgtcgccgcctccgttatagccgaggttttccagatatgcagggccggtttcggaaggaacatcggacgtgatgcgagcgtatcggctatgtgcgtgaattggcggggcggggcagtcggtggtcacccgctggccgtgaatcccgcgtatctcactgccaaggctggcggcggaacagttgatgaaatcccagaaacgcagggaatcagcctgcgtacgccaccgttcggcaccggccatacgccacgtgtgatggtcgagataaacgccgtcaaaactgtagttgttcaccatgttggcgttcagcccgccatccgcaccatggttgatgtcctcgaagaacacgccgtacagtcgcccgcttgtgtgatgggtggggcttcccacgctaatccgcaccatggtttcgattgtagagggaatggagcggaaaggtaaacggaagagttcgctcaccgttcatgttgcggtcaatccaagtcgactgttcgccggtatacagccggtaacctcgaaacaggaatggaaaatacggacgactaggagcgcggctgtgcaatcctcggtgggaatacgtgagcgcatcgaccacgtgtatccgtcgctgcgtccggcggagcgcgccgtggcccagtatattcggaatcatatcgaggaggcggccgacctgaccgtcggtcagatggccgacatcgcccacgtcagccagccgacggtgattcggttcgcccgcaagctcggcttcggcggttaccgtgaactgcggtacgtgttgcgcaacccggccgccgaacacaaagtgaccttcaatccgctggccggattcgatctgaatccgtgggatggcgaagatgagattcccggtaaagcggccgatggcgcgaaggcgctgatcgacgagctgcacagtgcgttggaccccaaggcctatcgcaaggcggtcgccctactcgccgaatcggagttcatcgacattttcggcgtggagaattcgttgacaccggcgatggatctgttcaccaagctcggctacctgggactgacatgccgtctcaataccgacgcttacctgcagcagatcggtgccgggcacctgccccacggcgctgtggccgtcgccttctcccattcgggcagttcggcggatacggtcaaagcgttgcgattggcgaagtcgcatggcgcgaaaaccatcgccataaccaatgccatcggcgcgccgctggccagctgggccgacgtgacgttgctgacgggtcgtgattcgcacacgatctatggcaatgcgattttctcgcgcgtggccgataccgcgctcgtggacatgctgtacatgggcgtgattctgtccggctatggccggttctccaccgcgctcgacgaatccggtcgcatgattcgcgaccgcgtattcgagaactgagctgctgctttatcgcgccttgggccgtattgctctggtcgttgctgcttgggttgttgacgatttggtcgttgtcgccctggtcgctaccgtcctgaggcatgtgccagcgaatacgtagtggacttggcgtgcgtatgacgttcgatcttgccgctcaactccagctggtccaagagctgcgtcatctgatccttgttcaggccaagcgctttctgcatggttttacggctgagcttcacaccgcggaacgcgaggaaattgagcgtgaactgttccaacgtttgaggcgacggttccagcgtcgctgtatcgagcgggcgggtactggcctgatcgtcaccgtccgggcgttcgccgaatccactgccgagaatcagcgtctgcagtggcgcgcagccgatgatgcgtgcgccggccaaagcatctgcggcgttatccgtcatgcgctgaatcgtggggaatgagtacattttggcatgctgtgcttcgtcagtggtgctgggcgcggcggaagcatcggcatcggtccgatgcgaggacgcggcctcggccgatacagggataggcagtaccattgccaccgaagtggggcccacgcgcagttgcggactgaccgcgctctgcgcgtaggcgtccataatgcgttgaatgccggtaccgcagttctcgcagaggcccaaatcggcgaacaattcagccaaacgcggggtgcgtggctggcatacgccgttgagtagatcgttgatttccaaaccatcggtcaggccgccgagcgacacgatttccaagcgggaatcgaagatattgatcagtgtggggccggagtacgtgtaatcgcgatgttccagtgcgttgaccaatgcttcgcgcagggctatggccgggtattggccggattcgttgatgccgttcagcagggcgctggcttggtcgagctggcgcagcaccgagccggtgaatgtgtgacgttcgcgaatggcgtttttgccattgccctcgaaaatggtggccttgataacgaacgggcattggttggacagcagggtggcaagcgacgattcggtggtgctggtgaaggtgttgttggtgccggtgttggtgatgctgccggcggggacattaccggcatcggcagagacggatgcagccatgttggtcacaaccgggctttcccaatccttgccttcactggcaaaacgaccctgtgcgtatgtgaaagtgagctcaccgctatcgcctgcgacggtctggcccgatgcggcgtgatctacgttgctctccgttgtccccatatcgccgatggtaccggtgcaagccgacgttacgccgaggtgttttacacccctacggctagacttacacgagtttggccccgtagctcagctggatagagcatgtgacttctaatctcaaggtcgacggttcgagcccgtccggggtcacgatgtaataagcccttggtccctcatcgtttgtgaggggcaggggcttttgaatattatgccggtctgggtccgtctggagcctgaactgtcgaccttgagattagaagtcacatgctcatcaccaccatccgggaacacccttaaggggtgcgtctcctgcataacggctatactctgacttgagatgtgctggataataaccagctatcgcgcgtccgccaatggcgacgaacgagggaagaaggcccgtgccacgagcaatcatcgaggtaagaaacctacgcaaggaataccccgtcgaggatgagacggtggtggcgcttgaccgtgtcaatctcagtatcccgcaaggccagatctgctgcattttcggcgaatccggctccggcaaatccacgctgctcaaccagttggccggcatggaaaaaccgacgcgcggcggcgtgagaatcggcggcgtacccgtcagcaaactcgacgagcgtgagctggcggccttccgccagaagcatcttggcttcgtattccagtcgtacaacctgctgcccaatctgaccgcgctcgaaaacgtggcaatgccgctgatgttccgcggcgtgcccaaggaacagcgcgaacgtgcggcgcgtggcgtactcaaacgagtcgggctcggccatcgtctcagccattacccgcgccagatgtcgggaggccaacagcagcgcgtcggcatcgcccgggcgtttgtgaccaagcccgaggtggtgttcgccgatgagccgaccggcaaccttgactctaaaaccaaaaccgaggtcatgacgatgatctgcgcattcgcccatgacttcaaccagaccatcgtgctggtcacacacgatccgcagatggcctcatacgccgaccgcatcgtcaccttgctcgatggccgcatcaccagcgatcggctcaacaccgacctttcccgcccaactgttccgtccacgccgtccgccccaaccacaccaactacaccgtccacgccgtccgcccatagaacccaaggaactgaccgatgaagcacctctcccaccacaccatcgccatcatcgtcgcgttgctctccacgctgtcactggcacttgccgtcatctcccttccgcatcaggcgtacgcggtcgacggcacagacggcacaagcggcacgaacagtacgtctcagggaagcgacggcgattccgcgccgatcgccggaccggtgcccaacatcatcatcaccaacttcgcgtatggaggtgattccgtggccgccggatccaaattcaatctcgacttcaccttccagaacaaggggcaggtggcggtgacgaacatggtcgtcaccgtggacggcggtgagagcttcgccatcgcgggaggcacgaacacgttctacgtcgacgcgctgtgggccggttacgccatgacgcaaagcgtgccgatgcaggcgctcgcctccgcgaaaagcggtgcccagtccgtgaccgtgaacttccgatacgagtatgtggacgccagcgcccgctcctcaagccagtctgacgtcaagatttccgtgccgatcagtcagcctgaccggttcgaaatcagtgatcccgtagtgcccgaccaggtgatcgccggccaggaaaacacggtcacgatggaatatgtgaacaagggcaaaggcgatatcgccaacgtcgaggccacgatggagggcgaaggtttcgatgccacgatgaaaacccagtacgtgggcaatgtggcttccggcgccaccggcacgattggttacgccttcacgccgcacgcgtcaggcgagctgaagaccacgctcaaagtcacgtacgaggattccgacggacagaccaagaccaaggaattcccgctcgccatacccgtaaccgatatgcagccgatggatgattccggcatggccgatccgaacatggaacagaacgccaatcagggattgccggtgctggtgtatgtggtcatcgtcgtgatcgccgtggtcattatcgtggtgattgtgctgctggtgcgtcgccggcgcaagcagaaggccaagaagaacgatattgatgaggactgggatgattggtccgaaggcaaggatgataagaccgataccggcgtgacggatggtgctgcggcagacaccgctcctattgcaccagcctcaccagcctcaccggccggcccgtcccacaaggcctgaaaggcccgaccatgcgattcggcgacatactgcggctctgcagacaaaacctatggcggcgtaaatcccgtacgattctgaccgtgctgggcgttatcgtcggctgctgctcgattgtgctcatggtctctttgggccagggcattaacgagcagaacgagaagatgctcaaatcgatgggcgatctgtccatcgtcaccgtgtacaccaacggttatgccggtccgatgggcggtggcggttcgtccgagatgggcgataccaagctcgacgacaaggccgtggaatccttccgcgcgatgagcggcgtatccggcgtgacgccgatgatgaacttcccttataacgtgacggccagagccggcgcgggcggccgttacatctacgattacgtgcagatcatgggcatcgacatgacccagttcgaccagatgggctacaagctcgtcggtggcgagaagccggtcaaaaaagaccaggtgcttgccggcgaatggttcgcctatggtttcatggacaccctgaagaacggcgaacaacgcaccagcacacgcggcggtcagtattcctcatgcacgtttgaccagaccacaggccagtgcgaggaagaccaggacgaggatccgttcttcgacccgctcgccacgcaaatcagtctgaccaccggcaccaattatcagggcgaccagtacaccatgaacatgtacggcggcggtggcggcacaggcggcgcgggtggcaacaccgcgggtcagtcggaaaacgtcacctttgatgtgcgggcttccggcattgtggcgggcgactataacaaaggctatgccacctccgacggtctggtcatggatttgcaggcgttgaaggaactggccgccaaagtcgatccagccgccgccaaaaaagccaccgcctataatcaggtgctggtcaaggccgccgacctcaagtccgtgcccgaagtcgaatcacagatcaaagcgttgggctacgagacctcctcctatgaagacatgcgtaagtcgttggaagaacagtcgcgcgcgattcagctgattctgggcggtatcggcgcggtttcgctgttggttgcggccatcggcatcgccaacacaatggttatgtccgtaaccgagcgcacgcgcgagatcggcattatgaaggcgcttggctgctacgttcgcgacattcgcgtcatgtttcttgcggaggccggcgcgatcggattcttcggcggattgatcggctgcgtgctgagcggactgatatcgctgggcatcaacgttgtcggcgcgttgtatgcgggcggcatgagcggcggcatgcctggcggtatggtcagcggtgcaggcgggggctccggcgacggtaccggtggcggaacatctatctggaccatactctggcaggcgatagttggtggcgagaatgtgacccgttattcggtgattccgtggtggctgttcctgttcgccgtactgttttccacgctgatcggcttgctgttcggcttcggcccggccaataaagccgttaaaatcccggccctagacgccatcaaaaacaacgagtgatcgcctctgtcacctgctccaccgttagtccataacgttcgttcagttcgcccagcggcacgcggtcggtgaattccttggctgcgccgaagttcagcacatgaggattacggctgccgtccgagacatgatgattcgcataatatgcggtcactttctcgccccagccgccttcaagctgcccgtcttcaagggtgatgacctgctggtggccatcacgcaacgactccagtacgtctgaatccagcgacgtgcactggcgcgggtcgataaccgttgccgtgatgccataatcggcagacaatgcggcggccgtctgctccgccaacggatacgcattgcccagtccgataatcgcggcgtgcgagcccgtctgattgacccgccaatccagcatgtgacgcacaccggcatgctgagccgttacgctaacggtcccgcggactgttgcggcagatatgcccccgctggcggagctgacggagactggcagcgaagttgactgggggcggtcagcgatctgcccacccgtcaccggcagcagcgtcgcatcccgttccgccgtcagaatcgcctcgcccggcactcgaatcaccaccggaccagcaggggcgtccgcagaaccggccggcgcggtagcccatgccagatcagctagatagtcgcgagccgaagtcggcaccagcatcgtagcccctggaatattggagaacatcgtcacgtcatacgcgccggaatgcgtattgtccgaaccggacaggccgcccagaaaatcaagtaccgtgactcgcgaacggttcaggctcatctcctggaagaactggtcgtacgcgcgctggaagaaggacgccgtggtggccaccaccggcgtgccacccgcccgtgcgatgccggcagcgtacgccacggcatgcgattcggtgatgcccgtgtctacataatgtgcgcccgcgcgctctcggaactcatgggtgatgccgttcgagcccggcgtggcgggggagatgaccacgagtcccggctcggcggcgaaacgcggttcgagtgcggccatcgccattttgccgtaatgcttgcgcggatcgtccggcttgccgattgtggcatccggattctgccaatgcgaggcctcgcactggccctcatgcggttcatgatcggacaggttgcagtgatccgaatgccacggctcgctgtggttcacgttatcggtgggatgcacgccggtgggggagtcgaacgaaaccggtgaggccgaggcggtttgccgatctgcgtgagtctcctcaccgtcatatcccgcgcccttcagcgtatgaatatggaccaccaccggatgatcgatatcgcgcacttcctcgaaagctgcgaccagcgcggaaacatcgttgccggcctccacataccgataatccaagccaaacgcgttgaacagattcggctgggcggtgccgccggacgcgcgcaggcgggcgagcggaccgtacatgccaccgaaatcgccggcaatcgacatctcattgtcgttgaacacaatgatgagattgccgccctgctcggccgcgttgttcagtccttcaaacgccacgcccgaactcagcgaaccatcgccgatcacggcgatcacattgccgatgcctctgttcgggccttccatatcgcgggttttcgccaaaccgcaagccaatgaaatcgaggtaccggtgtgaccgagcacgaactggtcgtgtttgctttcgtccggattggtgaagccggtcacctcgctgaaacggtccgggtccagataggcggcggcgcggcccgtgagcatcttatgcacgtagctttggtgggatacatcgaacacgatgcggtcacgcggcgaatcgaatacgcggtgcagggccaccgtggcctccaccatgcccagattggagccgatatgaccgccgtgttggtggccatatgccagcagcgtggcgcgaatctcacggcagagttcggcgagctcgttgggggcaagggccttgacatcggccgggctggcaatgcggctcagcagatgggagtcgtcgccgtgggaaggggtaatgctcgggggtatgtcatgaaggcgcgtggtcccctcggcagcgccggagacggcgaaggaatcgcttgaatcaaatccgtttcctgacgcgctgcgcataccctcgaatctcccttcgctagtctttccgaagttgaatgctaacgcccggcattgtccgaggtccacatgacgaagcaatgcccccaacatctccgtaaatgggtgattcgttcgctgcgcgatgtgggacaatgaatgcggtaattccctttgataccaaggagcgcgcaatgaaggccgtatacgcatccaccgtcaaccatgccgatccgcttgccgcgttggcagtgggcgagcagcccgaaccccaggcccgcccgttctggtcgaccgtttcggtgcgcgcggtgaccgtaaaccatcacgacgtctggtcgctacagggtgtgggtctcgccgccgaacagacgccgatgatcctgggcaccgatgccgtgggcattctggacgaggacatccccggcaagcatgggctcaaggccggcagcgaagtggtgctgtacacgttcgtcggcaccgatggcgcgggcgtggccccgggcgagcgccgcacgatcctctccgagaaataccccggcacgatggccgagaagacttccgtgccgtccgccaacgtgttcgccaagcccgcaaacctcaccacggctgaggcggccgcactcggcaccagctggctgaccgcctactcgctgttgttcgatgccgccggcatcaagccgggcgactccgtgctcattcagggcgcgggcggcggcgtgtccactgcggccatccagctcgcccatgccgccggtctggaggtgttcgtcacctcgcgcgacgcggacaagcgctccaaggcgctgaaacttggcgcgaacgccgcgctggagatcggtgcccgcctgccgcgcaaggtcgatgcggtgatcgaatccgtgggcgcggctacttggagccattcgatgaaatccgtgcgccccggcggcaccatcgccatctgcggcgccaccaccggcgaccagcctggtgcggagctcacgcgactgttcttccaggacatccgtgtgcagggctgcaccatgggttcgcgcggggatttcgcacgattgctgcgcttcgtggagcacgccaatctgcatccggcgatcgactccgtggtcagcggtctggacgccgcgcccgaggccttcgccaagatgattgccggtgacgtgttcggcaagatcgttattgagctgtaagcctcacagaattatgtattgagaacgattcgctgcgtggcttaactccgctatcaggagtacagtgggccttattctcaataactagggagtaaatgataatggcaaatgaatccaagcccgaagtcgcggtggtcatgggatcctccagcgactgggagaccatgaagcgtgcctgcgatattctcgaccagttcggcgtcgcctaccacaagcaggtcatttccgcgcaccgcacgcccgagctcatggccgagttcgcgcacaacgcccgcgccaatggcctgaaggtcattatcgccggtgccggcggtgccgcccatctgccgggcatgatcgccgcgcagaccacgctgcccgtaatcggcgtgcccgtgcgctcccacgccctgtccggctgggattcgctgctgtccatcgtgcagatgcccggcggcatcccggtggccaccaccgccgtcggcaactccggtgccaccaacgccggcctgctcgccgtgcagatgctctccgccttcgagccggaactggccgacaagcttgaggattaccgtaacgaactgaaggaaaaggtggccgaatccaatgcccagcttgtctgaagaaacgggcggccgcgtctccatgctgatgccaggctcgaccatcggcatcatcggcggcggccagctcggccgcatgatggctctgtccgcccgctacatgggcttccgcgtcggcgtgcttgacccaacgccgaactgcccgaccggtcaggtggccgatttccagatcaccgccgaatacgatgacaaaaccgccatccatgatctggccgtgcagtctgacgtgctcacctacgagttcgagaacgtggacgccggcgccatcgacgaggtgcgcggcatcaccgccaccccgcagggcaccgacttgctgcgcgtgacccagcaccgcgtgcacgagaagcagttcatcaacgaccacggcaccgccaccgcaccgtggcgcgctgtcaacaacttcgatgagcttgacgccgccctcgacgagatccattatccggccgtgctgaagaccgtgtccggcggctacgacggccacggtcagctcgtgctgcgttccgacgccgacttggagaagatccgctcccgctccgaccgtggtggtggcttcccgccgagcatcctggaaggcttcgtcgacttcgcattcgaggcttcgatcctggtctccggcaacggcaaggacttcgtcaccttcccgattgtgcgtaacgagcaccgcaacaacatcctgcatatgaccatcgcccccgccgaggtgtccgaacatgtggctcgcgaagcgcatgaactggcgattcgcttggccaagggcttcgaactggctggcacgctggccatcgaactgttcatcaccaaggacgatcgggtcatcgtcaacgagctcgccccgcgcccgcacaactccggccactacaccatcgaggcctgctcgatggaccagttcgacgcccacatccgcggcatcgccggctggcccatgcccaagcccaagctgctctcgccggccgtgatggtcaacgtactcggccagcatgtggaaccgacgcgcgcgctgatcgccacccacccggagtggaatgtgcacgactacggcaaggccgaagtgcgccacgaccgcaagatgggccacatcaccgtgctcaccgacgacccggccaagacggtcgctgaccttgaggccaccggctgctgggacgacctgaaaaagaaggcgtgaccttaccgatggttgaacatatcgaacgccagaccaagcagaaggacgcgattcgcgccgccttggccgactgcgaggagttcatctccgctcaggacctgcaccgcaggctggaggacgaaggctcgaaaatcggcttggccaccgtataccgccagctcaacgccttggccgatgccggtgccgccgacacgatccgcctggacggccagcagctgttccgcctatgcggcgacgacggacatcaccaccacttggtgtgcaggcggtgcggcaaaaccgtggaaatcgacccgcccagcgaggcttggctgcgcaaagtggccgacggccacggcttcaccgttgaatcccacaccttggaggtcttcggactgtgctctgattgccaaaaggagcagaaagcgcagaaggctcagaaagcagtgagcgaataacaaatgggatcggcttcaaagccgatcccatttgttattccgctgctattccactgactttagcgcgccgagcatgctgtttctttgaggtcgtgttctgcacgatgcctttcacgccgtccagcttcatgagcttggcgctgcgcgactccacattggaggtctcgtggttcttgagccgcaccatataggcgttcgactggtgctgctcgccgaacacgtgcttacagccacccgaagtcatgaacatgaaatgcccgaagtagggaagccggcttgtcacgcagctcgcgcttggccgccacccaggccggtatcacggcgctcgcccacgccaccagggtgatggcagggtggaacgccagcatgacacgccgatgtaaatgcaaatgataataattctcaatacatgttattctgtcgtgttggtggctgggcgatgatgcagcaacagcagcatcgcccggccaaacagctaattagagaggaaaacccaatcatgtccatcatgtccaacgccaagcgcgcgctcgctatcgcggccgctgtggcgaccctgttctcgatggccgcctgcggttccagcaacgccgccagcggcaagtccgattccagcggcgccgcgtcttccggcaagatcgaggtcgtcgcctccatcaaccagtggggttccgtggccgaagacctcggcggcagcaacgtcgaagtcaccaacatcatgaccaagaccaacgtcgaggcgcacgattacgagcccaccagccaggatgtcgccaagttcggcaccgccaaggtggccgtggtcaacggcgccgattacgacccgtgggccaccaaggccgcccagtcgaccaaggccacgctggtcaccgccgccgaaaccgccggcatcaaggaaggcgacaacccgcacgtctggttctccgccaaggtgcgttccaacaccgccgacgccatcaccgccgcctaccagaaggccgacccgagccacaaggacgactacgccaagctcaacaaagaatggcacgccaaggaagaccagcttgagtccaagatcaaggagacttccgccaagaccgagggcctgccgtacgccgccaccgaatccgtggcctggtacctggccgacgacctcaagatgaccgacgccactccgaagggctacgcccaggcctccgccaacgagagcgagccgaccccggccgacatcaaggacttccaggacaccctgaaggccggcttcatcaagatgttcgtcttcaacagccaggaagcaaactccactactgaccagatcaccggtgccgccaaggacgccaacgtgccgatcgtggagctcgccgagcagatgccgaagcagtacaccaacctgctcgactggatgagcgcactggtcgaccagttcgccgccgccgtgaagtaatgcggcagtagccgtcaatccgcaacagtgataaggggaataatcaagtcagatagcgaggcgttgtctaggggagaacagaacacttcgctatcagggataggctccttatatatcagggtgcttcggggatgtcccgaggcaccctttgcgttagggtgaatagttaggaaacggtaagaaaaatagtggaactatggattttccaaggttcagcggcaacaatatgcccttgaaaagtcacatacggaaacaggcgaatgagcgagaacactagtaataccaccacagtgaaaccccatttcaagctttgggccaaaaaggtcgaagccaatgaagtcacgccccaacacccccacaagcccttccccggctgggtgtacggcgtgctcttcgttatcttcgacatcattgtcgtgacggcgctcgaagtgggcgtttcgtccagctccacccgtgtgcagctgtccagtccgatcgtcggattcggcttcgtgagcaagatgtggaccgacggcaatttcgtattcgtgctcaacgtgatacttgtcgcgttgctgtacctcatgttgctgatgctgttcaaccggttctggacggcaagcatcgtgattcttgcggtcggaatcatcgtggccgccatcgaacatttcaaggtcgagatccgttacgaggccattctgcccgccgatctaggcttccttggctcgaacaccggcaacatgctcaccttcattccggccggtgcgcatgtgaccatcctcgtggcactcggcgcgttcgccgtactgctcgcgctgattctggtgctgcgtcatttcgatgggcgcaaaggtcgcatgattcgtacggataacctgagcctgaacctcacctcccgtctgattcttctgctgctgccgattctggtgttcgcgttgtactgcattcatgtgagcaccaccgattcgctggccaacaagttctcccgcgccttgggagacacgccatccatgtgggattccgtgtatgacgcgcagcgcaatggtccgctcgtggccttcacccgccagctcaacccgaagatcatggacaagccgagcaactactccgaggagaccatgaagaaggtcgccgctcgctatcagaaggaagcggagacaatcaacgcctcccgcaccaacaacctcactgattcgacagtggtgtacgtgttgtccgaatccttctctgacccgagccgcgtgccgggactgaagaccaataaggattcgatgcccaacatccgcaagatcaaggcgggcaccacctccggcctgatgctctcctccggctacggcggaggtacggccaatctcgaatacatgggactttccggcctgagcatggccaatttcgagtcctccctgtccagcccgtaccagcagctggtcccgagccagcattggactcccaccatcaaccagctgtggggcgcgcccgtcaactcgctcggctaccacccgtacgaatccagcatgtactcgcgtgccacgaactacaagaagttcggcttctcgcacttctacacgttgaccggtccggacgtgatcaagtatcaggacaagatcgacgagtcgccgtacgtctctgataagtcttcctatgattctgcgttggaaggcatcaagtccggcaagacgaacaagttcattcagatcattaccatgcagaatcacatgccctaccacgagtggtatgagaataacgactacaccgccgaatccaccacgggtacgccgctgggtgatgatgaacagcagtcgattgagacctatcaaaagggtgtggagattaccgatcaggccactcaggagttcctgaatgaactggatgcgctggataagcccgtcaccgtggtgttctatggcgaccacttgccgggcatctactcgtccgccagcgaggatgacaacaactccttggccctgcacctgaccgattacttcatctggtcgaataaggcttccagctcccaaggcaataaggcaagcgatgcagcctactcctcgccgaacttcttcgtggcgcaggccgccgatcacatgaacgccaaggtcagcccgtatctggcgttcctgaccgaaatgcattccaagatcgccgccatggaaccgcctgtggtcaacaagatccaaggctgggatcgtatccccgaaggccagaacatctatcttgatcagaacggcaacccgatgtccaccgatgacttcgacaaggaaaccaagcagttgcttgccgactacaagctcatccaatacgacatcaccgccggcaaaaactacctcaaagacacggactttatgacgctgccgtaaagcagacagcctagtaggctgtctgtaggcagcgtgcgagccgacagacgagccagcaaggcgcggggcgtagcccgtccaaaattgcagtagcgctgccgtaaagcagggggtgctttcatgacgaaccagactttcgaacaactgaagaagacttacgaatccggtcgtacccggccgctggcatggcgccgcgcgcagctgaacgcactacgccgtctggttacggagaaccgtgatgcctttgtctcctcggctatggctgacttgggcaagcccgcggctgaaaccgtgctcatggaactgaacctggtggctggcgaagcacagttcgtgcgcaatcgtctgagcctttggaccgcccggcatcccaaagcgatgcattggatgttgcagccggctgccggatggacaattgccgagcccaaaggcgtggtgctcatcatttcaccgtggaattatccggtgctgctggccttggaaccaatggctgatgcgctcgctgccggtaacgccgtctgcttgaaaccgtccgagctttcaccgaatacgtccaagctccttgctgagttggtgccgcaataccttgactccgaggccgtgcgcgtggtcgaaggcgggcccaaggaaaccggcgaactgctgaaatgcccgttcaaccacatcttctataccggtggcggccacgtcggcaaaatcgtcatgcgcgcggcggccgagcatctgacgccggtcacgctggaactcggcggcaagtcgccatgctttgtggatcgcactgcggacatcaatgtggctgcacgccgcattgcgtggggcaaattcaccaatgccgggcagacttgcgtggcacccgactatgtgctcgccacgccggatgtggccgaggctctggccgagcgcatcgccgtagccatcaccgaattctatggcgaagatccgaaggcctcgcctgattttggtcgtattatcaacgatcgtcattttgaacgactgtgcaagctattgccggtcggcaccgtgccgcctgaggagccgagctcgccgctggtgcaggtggcatcggcggtaggcgcggccatggatatggttgggcggcgcttcaatgccgtgactactgggcgcggtggcgcgggggagatggccggcagcgcgaacaatgcggcgaagccgacggccggttcgaatatggcagccgctgatgatggtgcgactgcctcggccgctgttgagccgagcgagattcacaaggtgcccggcgtgttcgacctggccggtcgaatcgtttgcggcggcaaggtcgatcgtgccgcccggtatatcgcgcctaccgtgctgtacggtacgtcgccagatgcgccagtaatgaaggaggagattttcgggccgattctgccgattctggtggtcgaggatgccgagtccgcaatccgattcatcaacaagcggtcccggccgttggctgcatatgtgttctcgcgcgatcacgaggttcggctgactttcgaacgtcagaccagctccggagccttgggatattcgctgccgttgggccatctgctgtccagccggttgccgttcggtggcgtgggcgcgtccggcatcggcacctaccacggcaaagcaggcttcctcaccttcagccacgtcaaaaccgtggttaccaagccgcagttccccgacactctgcgcctcgtgtacccgcccttcaatgaagccaaggccaaactgttcgacatcatcgccaaattcagctagcgtgatatcgctcgctgatattgggtgatggcgttgtcatagtgacgttcgctgtcccggtaattacgtcaatcgattgattcgtgtaccgggccagatttttctgtcctggtatttgatttcgagtcatttttgcttaccgggacaaaactgacgccgaaagtatcgtccgcgtattacgaaaatggcggaatagtgcggtttcgtatggaagggaatttcaaatattcctatattcgaggggttcagctgtcctggtttgcgaaaaagagccgaaatcggctaccgggacagaaaaatctggcccggtagccacgtcaatcgattgacatgtctgccaggccaaaaatatgcagcagatgcgccgcttctgttacttcagggctttgaagccgatgtcgtggcggtaaaacagtccgcgcagctcgagcttgtcgatgattgcgtagaccttgtcctgggcggacttgatgtccggagcggaggtttcgacgagcagcacgcggccagagttggccacaaggttaccgtgctcgtcagaggcgacaccggcgtagtagacgtgcgaatcctcgtcgacttcgatttcgggcacacgggcacccttgatgacgttctccgggtagccgttggaggcgatgaccacgccgagggtggcgttggactcatcccaggtgaattcgggggtttcgccgtcgagaatggcggagatgccggcaccgaggtcggaggtgagcttcgggagcacgacttcggtttccgggtcgccgaagcgggcgttgaattcgatgaccttcgggccgtcggcggtggcgatcagaccggcgtacaggatgccggtgaatggcgtaccttcctcggccatgccttcgacggtggggcgcacgattttctcgatggcctcgtcgaccacggactgcggaatctgcggcaccgggctgtaggcacccatgccaccggtgttcggaccctcgtcgccatcgtgggcgcgcttgtgatcctgggagatgggcatcggccagaaatcggtgccgttgacaaagctcatcagggagaattcctggccgtccaggaagtcttcgataacgaccttggcaccggcggagccgaagcgatggtcgatgaagatgtcttcaagcgcacgctgggcggtgtgctcgtccatggccacggtcacgcccttgcctgccgccagaccgtcggccttgatgacaatcggggcaccgtgctcgtgtacgtagtcctgcgccatctcgagatcgctgaaggtcttgtattgggcggtcgggatgttgtgtcggtccatgagctgcttggcgaagtccttggaaccttcaatctgggcggcggccttggacgggccgaacgccttgatgccggcggcggcgaaatcgtccacgatgccttcgatcagcgggacttccgggcctacgaacacccagtcataaccattgttcttcacgaattcgataagtgcggcgtgattcgactggctcagctgcgtggtgtggatgccgtccttgagcatgcccgggttgccgggagccacggtgacttcgtcgatgctcggtgccttgagcagcgtgtaggcaatggtgtgctcgcgcgcgccggagccgataaccaatactttctgacccatgttgttcctttcctgcggaaagcgagttacttcagtacgatttgcgtgccggtggtgtcggcggtgatggagccgagcacgtaggcgggctcgttgttgtcggcgagcagcttcagcgcctcgtccttgcgagcggggtcgatggccagcaccatgccgatgcccatgttgaagatgttgtacatctccttatgatcgatgttgccggccttctccagcacgtcgaagatcgggagcacgggccaggtgccgagctcgatttcggcggccaagccgtccggaatcatgcgcgggatgttctcgatgaagccgccgccggtgatgtgggccacgcccttgaccacgcccgccttgaacaggggagagagggccttgacgtagatcttggtgggggtaagcagcacgtcgccgagcttttcgccgcccagctcgtcgagttcggtgtccacggtgtagccggcctgctcgaacagggccttgcgcaccagggagaagccattggagtgtacgccggtggagggcaggccgatgagcacgtcgccttcagcgatggtggaaccgtccacgatggcggacttttcggcaacgccgaccgagaatccggcgagatcgtattcgtcttcgtcgtacatgcccggcatttcggcggtttcgccgccgaccagcgcggaaccggcctgtacacagccgtcggccacaccggccacgacctgctcaagcagtgccgggtcgttcttgccgcaggcgatgtagtcaaggaagaacaacggctcggcgccctgggcggcgatgtcgttgacgcacatggccacgcagtcgatgccgatggtgtcgtgcttgttggccagcttggcgaccatgagcttggtgcccacgccgtcggtgccggagatgaggaccggctccttgtagcccaaggaggccagatcgaacaggccgccgaagccgccgatgccgccgaccacgccggggcggttcgtgcggtccacgtgcgacttgatgcgcttgacgacttcgtacccggcttcgacgctcacgccggcgttctcatatgcttttggcatttggttggcctttctacttattttggctcccctctggaggggagctgtcggcaaagccgactgaggggaggcaagcgcctctggttcaaagaattgttattgagtggattggtggtgagctattcggcatccggctgcacggtgttgtactcgttgccgatgtacttgctcttgtacagcgcgaattcaggcagacgcacacggtcctcgggcgtgagggacttcaggaagtcggcctcgtagtcgtcgagcgcagtggggtagtcgccgttgaagtaggcgacgcacaggccaccgtatggggcatcggcgttcagtccgatggattcgaccagaccgtcgagcgaaaggtaggccaaggaatccgcgccgatgtattcacggatttcctccacgctcatcttggctgcgatgagttccttggtggtggagatatcgatgccatagaagcaggggtacttcagcggcggggagctgatgcgcatatgcacttcagcggcgccggcttccttgagcagctgcacgatgcgcttggacgtggtgccgcgcacgatggaatcatcgataacgataacgcgcttgcctttaaccacgctgcgcacagcagagagcttcatacgcacaccctgctcgcgcagttcttgcgtgggctgaatgaaggtgcgggccacatactggtttttgattagacccatttcgttgggcaggcctgctgcttccgcatagccggatgcggcggacaatgaggagttcggcacgccgataaccatatcggcctccaccggggattcggcggcgagacgtgcgcccatgcgcttgcgggcggagtgcacgttgacgccatagatatcggaatccgggcgggcgaagtagatgtactccatcgagcagatggccagctgcgtgttgttggtgtactgcacgatcttgtagccgtgatcgttgaccaccacgatttcacccgggcgaatgttgcgcaccagctcggcgccgacgacatccagtgcgcaggtttcggaggcgagcacgtaggcgccgttcttcatcttgccgagggagagcgggcggaagccgttcgggtcgagtgcgccgatcatggcgtcttcggtcatcagcaggtaggcgaaaccgccatgcaccgtgttgagcgcttccttgagcttgtccataaaggtgcgctgcatcgaacggcgaatcaagtgcatcagcacttcggtgtcggagttcgaatggaagatggcgccttcgtcttcaagcttgcggcgcagtgacgggcagttcgtcaggttgccgttatggcacagagccacgtcgccgtcatggaagcggaagatgaacggctggatgttgtccgtggtgcccgagccggccgttgcgtaacgcacgtggccgatggcgcaattgcccttcagtcgttcgatttcgcgctcatcgccgaacacctgggtgagcaggccgagtccgcgatgaccgatgagatgaccgttatcgttggagacgatgccggcgccttcctgaccgcgatgctgcagcgcgtgcaggccgaaataggtaagtcgggcggcgtcagggtggccccacacgccgaagatgccacattcctcgtgaatgtcttcgagttcagccgacaagccaaagctcctttttcaaacaggggattaactatctatcaaccctaccaatcggcggctacatcgcgtgttgtggggtggtggaacttgttggggtttgcggacgcggtttaagcaccagatcagtcaagtatgaatagtggcttaggattttggcctttcgctgtttgtggtgggtgattgtggtgtggggtgatgccggcgggtaggttggaggcatggatacctcttacctgttcaccgccgcattacctggtgctccactttgtgctcaagcgtgataccgaattgtcggtgtgacgtgatcggttgactttcgtcaacgcaatttgaaaggctccgacggtattatccgtcggagcctttcgtcgtatgaatccggtgcttgttttttcggcttcgtctcagtgcctgaaatggctgaagaactcgatggtctcgggatcctgcgactcgtccatcacctcggcgggtgtgccgttctcggcgatgacgccgtgacggagcagtacgatgcggtcggccgcttcgtgggcgaagctcatttcgtgcgtggccatgaggattgtggtgccttgggcctttaactcggcaaccatgttgagcacttcgccgaccagcatcggatcaagagcggatgtgatctcgtcaagcagcagcagttccgggtcggtcatcagtgcgcgcgcaatcgccacgcgctgctgctggccgccagagagctgatcggggtaggcactggctttatcgcgcatgccgatgcgttcaagcagttccatagcgcgggtttcggcgcgatccttgctccagtggtgaaccttgattgcggcaagggtcacgttcctgagcaccgacatgtgggggaagaggttgaactgctggaacaccacgccgatacgtgcgcgaatcttgtcctggtcggcacgcgggtcggtgatatcggtattgcccagccaaatctggccgtcatcgacctgttcaagcaggttgacgcatttcatcaatgtggatttgcctgaaccggaaggccccagcaaagccaccacctcatgttggtgaatgtcaaaggaaatgccacgcagcacctgcgtgtttccaaaggatttgcgcacgtcatcaagacgcagcaccgtcttgttgctcacgggggagtcactcgcctcggtggtgatattggtcatttcgctcataccgttcctccgctgagttcgcgcttacgcagacgttccgtgtaccagtcgttcagcaggatgaacggcacgctcatcaggatgaacagcaggctggcgaccacatacggcgtgaagttgtaggtgctggccacgtcgatctgtgcggcgcgcacggcatccaccgcacccagcacggaaatcaggccgacgtccttttgcatggagatgaagtcattcatcagtgcgggcgccactttgcgcaatgcctgaggaatgacgatcagtcgggtcgtctggccggaggtcaggcccaacgagcgggccgaggctcgctgagaaggatgtacgtcgttaaaaccggcacgcagcacctcggagacgtaggcgctgtatcccattaccactgcaatggtgccgagtaccgagggatcgatacggccgaacaagcctaggccgggaatgccgaaaccgattagatacagcacgacgataataggcacgccgcgcatcacagtcgtgtagatcaatgccaggatacgcagcgggaacagaataggggagcggctggtgcgtaccagcgcgatcagcgtgctcagaatcgccacgccgaccactgcgacgagcagaacgcggatgttgagccataggccgtcaagcacatggggaaacgatttgacgaagtattcgccggagaagaaggtctccttgactcgtggccagccgggggagagcttcaagccgatgacgatgaccaccacgaacacaatggtgctgatcagactggtaatcgtcgattgaatttgctgatgaacacgatattggcgtcgttcgagctcgacctgacttacctcgtgtccgtcaggggcattgtgctgcctggtttcggttggtgctgcggtcatgtgatgaatgtcgctcgcttcctgaatgccgggatggccgggtgccacaggaaaattcccgcagcgcccggccaaggtgttgtgaccttatgatgtaagcctacttcacttacttcttcagttcggtcaggtcggtggtgtactcggccagccacttgtcctgaagcttcttgatggtgccgtcggcgttcaggtcatccactgccttggtcacggctgcagtcagcttggaatccttcggcagcacgatgcccatgccgctcttgtcttcggagtcaggcagacggccgagcaccttggagtccttgacctgctcggactgcaccatgtacacgcattccacggtgctggtgaccagtacgtcgatctgaccggcgtcaagtgcctgagccagtgcggcatcatcattgaacgtctggatgtcgtccttgatgttcgccttggcgtagtcgtaggcaagggtgccgaccatgacgcccacggtcgcatccttcagatcggataccttggtggcgttggcgaacttgctgtctttcttgaccacgacggactggctgtcgttgtagtagctggacgagaagtcaacggccttcttgcgctcgtcggtgatgccgaactgctggatgttgaaatcccagtccttggcgccgggagcgatggcggtgtcgaatgcggtgcgggtccacaccacgtcgctcttcttgaaaccgagcttgtcggccactgcgtaggcgacggccgcctcgtagccctcaccgctttccggcttgtcgttcataacccacggctcgtaggccggctgtccggtggcgatggtcagcttgcccggcttgtacgtctgctgggtgatgtcgtccgaatcggtggaattggatgcggtggactggccggaaccgcaggctgcggtgaacgacagagccaggatgctgacggtggccgcaatggtacggacgatgtgtcgcttattgaacatgggtttcctctcctcaagtgttcgtcatgcacacggttcaaaccgtgcttgatgcattcgcgccaattgtatggctattgggttacaaaacatcgatattttcggatgctggctatcgccattgcttatggccgactagagccgcgcaatctggcgcgtaagcggacggatatctcatattggcgcagagcgaaatggcgttcactgttcgagtgtgaagccgtcgaatacgaatcccggactgaccacacaggagaccagcgcatcgccctggcctggcactgtgcgctgccagacgccagccggtacgaccgcatgtcccgatacggttacgtcggcctgatcggtggtgatgccggaacccaaggtgattacggttcgcttggattcgtcggattccggagtctcgtcgctgccgccgagctccagtttgaccgatgccgggccatgccacagccagacctcatccgcatcgaccttatgccaggcgctggcatctccctcgggcagcaggaagtaaatcagtgacgatagcggtcggcttgaggcctcatccgtgtgcggggattgccagtcacgcgtgtaccagccgccttcggggtgggtttccagtccaaggcgttccactatggaccgggcgtatggactcatgtcttgcaaagcgacgctcataatgagatctcctgttcttggcgggtttgctggtttttggcttcttgatatcaggtcaggtcagcggtgtcaccaggcgttgttgtaggcttcgcgcccggatatcaccgtggctcggttcgtgcctgcgccgtgcctcaccagtgtttccagcgtttcttcgatgccggccggagatgatgtgtcgacggggatgtcgaagaacgcgaaatcagccaatgcgcccgcgttgatttgtccaatgcggttgcggcccacgtgcatgcccatggaggcggcgccgcccagcgtcatcatacgaatcaggcgatgtgtcagatcgtcgctggcatagccttgttcgcgggccaggtcgtaaagcatcgacacgtcatcaagcagatcgagggtcggcgtgctggagagcgaatcggtgcccacgcttaccagattgccttcctcgaggtattcgcgcaccggtgcatctttgccggtgttggtaatgcgattcgatcgggggcacaaggccacgcccacgccgcgctgacgtagaatacgccgatcctcgccattggcccacacgccgtgtgcaatgtgcacatccggtccaagcgagccaagctgatcgacgaactggatggcggaggcacctttgcccacttccttgagctgccggtagctttcccaatcgtggtcactccagtcggccgccgaataagtggtgagcaccggcggataagtgccggcctcgagcggggtctccgccagatggatatgcagtcgcatgttcagctgacgagcaatgtctggaagatcaacgaacggttcggactccagcgtatacggagcatgcgggctgatgccgaggtttggcagctgctcctcgttcatccggcgcaactgccggatgagctcagtgcggcccttttccatccattcggcgttgtgccagcccattacctcccaataagcgatgccgtgcatgccctgcgaagccagcgcgccggcggcgtccaaatcggtgacgatgtctgcggcggccgtcgttcccgattcgaccatctggcgagcgccgtcctcggcccactgcttccatggctgggtcttctgcgcctcggcgtacacctcgttgaatgccagttcccaggcgcggaaccgatcgtaggtgccttgcccgacctgcaccatgccgctgtactgcagatgagtgtgcgcgttgatcaatccgggggtgagcaccccatcccaatgccgttcatggatggtgccgtgagccgtcatttcctgcttcagcgccttcagcacccagcggcgtttacctacatgaaccacgcggtcgccatgtatggcaactgcgccatcgatgatgacggggcccgtcacggggatgatgagtttggcggaatacagtgtcacatcatcgataagctcggtatcgacggtcggccaggtgttgtcggtcatattctcctcgctgcgttgtgttcggtgccgtgtctatgtctatcggtcggcgttctctcggtcgttttccgcgaatctggtcagtcgccaattgtagccgttgtcctccacggcatggctggctcggtatccgcgcgccttgagcgcgctggcggcgatgcgctggtcggtcgctgcgtcaagtctgataagcgtgtgatccagtgtgcctcgatgttccagaagatatgcgacggcgctggcctgtacggcgaagctcagatccatgatctcgattggattgccgcctcccaccgtgtagttcacgccatcgccgtcggcgattagcgtgagcgttggtccgtcgggaacattgagttgcacggtgtccctgttgacctgtggggtgaagtcgcttacctcgtccaaggcgatttcgttggcgatgccgccgatcactgcgagcgccgcgccctcgtgcattgcgcgcatgtgctcaagtgtgaccgtatgtctcacgccagtggcggacaccaccatatccgcgcaagggagtgcctcgtcaatgtcttgtgcggcgaagccgtcgaacaccgctttgagtgaagccactggatcgatatcgcagatggtgacttcggcgccaagcgcgcgaatgcgccgtgcgaagccttggccgaccgggccgtagccgatgacggtgacgttcttaccgtcgaatgcatgctcgccgagaatgcgctgcatggtggtcacgcatgtctccccagtgccgtgggcgttgtcgaatccggttttcagcacactgtcgttaacggctacgaccgggtaggtgagggctcccgcttcctgcatctgctggaacgcgcgtacgccgctggtcgtttcctcggccactccaatgaggttcgccgtgagttcggggcgttcgagcgaagcgagacgggcgaagctggcaccatcgtcgatgatgatgtccggctgtatttcgtccagcaggtgcagggccgcctcgtgcgcctgttccgcggtccagtctcggctggattcgaccgtgattccttcccggcgcagctgttccgccactcggggatccgtggaatccgggccgcaatatacgccgacgattgcgccggcggccttaagcttgcgcagcagaatcgcggtctttggctccagtatcagacagacggcaatacgaatgcctgagaaatcgacgcgagtggtgaggctatccatggtgtcgcgtaataccggcatgtgctgttccgcgtactccattgcctccagtccgcttgccttgcgcatatcggtgatggaatcgatgctttgtgtgccgtcgcataggaattcctcgttgtgctcgtcggtcatcgtggcatcttcgacggtcatgccccattgctgggcctgagacttgatttcggcatgcttctgtggctccggaatcgcgagtcgggctcctgccagtgatcgattcgtcttctgggatcgggctgccgcccacgctgcaaaatcgctgtctgctgtaatgcttttcttcatattccccatggtacgcatgcatgccgctgctccgccgctgcgcgtgtggcgtgggtgaagagcgtgcttgggcgcgttgcgtgcgtcgacttcggcagcttcgaacaggcatgttgcatcgaacaaatgttcgactgtgttgatatgctggtcgggccagcggtggtaaggaggtgatggcgatgggcagcggaacggtatcgacgcaacgcgagcatacctatattgccattgatctcaagtccttctatgcctcggtggagtgcgtggctcgtgggctcgacccgttgaccacgcatctggtggtggccgatgaaacccgcaccgataagacaatatgtttggcggtctcaccctcgctgaagaactatggcattcctggccgtgcgcggctgtttgaggtaaaacagcgcctgaatggagtcaacatcgagcgcgcggtccatgctcccggcggccgattaatcggggagtcctgcgatgcgtgcgacctggaacgctcgccggggctcaaagcctcgatggtcatcgccaagccgcgcatggcgcactatctggaaatcagcgggcaaatatatggcatctacctcaaatacgccgcacccgagcacatccatgtctactcgattgacgaggtgttcatcgacgccacgccatatctgcgctcgctgggtatggggccgcatgcgatggcgcgaaccatcgtgcgcgaaatcctcaccaaaaccggcatcaccgccactgccggcatcggctccaacatgtatctggccaaagtcgccatggatatcgtcgccaagcacatgcccgccgacaaggacggcgtgcgcgtggccgaactgaatgaaatgtcatatcgtcggctgctttgggatcatcgtccgctcaccgatttttggcgggttgggcgcggctatgccaagaagctcgagcatgccggactgatgaccatgggcgatatcgcccgatgctcggtgggtcgtgcttcggattactacaacgaagacctgctgtatcgcatgttcggtgtcaatgccgaactgctcatcgaccatgcgtggggctgggagccgtgcgaaatcgcggatatccgatcctatgagccaggtgcgcacagcattagcagtgggcaggtgctcaccggccccgccgactatgccacggcccggctgatcaccaaggagatggccgatgcgctggccctcgatctggtcgataaaagcgtgctgacgaaccgactgacgctcgccgtcggctatgacatcggcagtcttgattcgtcaaagctcgattcgtgcgctgattatgcgatgaaacgtgccgctgagcgggcggcgaaaagctatcaagggccggtgaccatcgaccgatttgggcgcaaggtgcccaagagcgcggtcgggtcgattggtttgggtgatttcacctcgtcgtcggcacgtattcgtgaggccatgacgatgttgtacgagcgcattgtggattcacgcttgcttgtgaggcggttgaccgtcatcgccgatgatgtggccactccggaggagctggccgccggcaaacgctatgaacagctcgacttgttcggtgatgacgaggcccaatcgtatggatccgattccaccggcgaaaaagatggagagcatgatatccagcgtgcgctgctggatgtgaaacgtaaattcggtcgcaacgccgtcatcaaagccatggacatggaagacggtgccaccggtcaggaccgcaaccgtcagatcggaggccatcgcgcatgaccctgcaagagacccgtgcgtacgacgacatcatcaacctgccacaccatcagtcgcgcaagcatccgcacatgtcccgccaccagcgggccgcgcagttcatgccgttcgcggccctgaccggctacaaccaagtcatcgagcaaacagcaaaaaacgccgaaaccgccatcgctcaggccgaagcccaaggcgataccgatttcggcgcttgacaatcgctctcgttggaggaagtctcagattcgtcagcctacgtgacgttcgaagcggtggaagccggtgatcttgtcgatttcggccatcgcgtcagccggaatcacaaagcccgcggccttcatgttgttctccagttggctgggcttggaggcgccggcgatcacacagctgatctccgggtgctgcaggatccatgccatggaaagcaccggcaggttcgtgccgagctcgtcggccaccttgcgcagctgctcgaccttgtcgaggttctcatcggtcagcagatcgttgatctggtggtcggactgccaggtggcgcgcgagccggccggcagcggctggcccttgcggtacttgccggtcagcagaccctgcgcgagcggggagaacgtggtgatgccgatgccgagcttgcggcaggtgcccatgatctcatgctcgatgtaacggtcgtttaggttgtactgcggctgaaccacggtgatcgggtacaggttgtagcggtcgatgatgcgctgggcctcttcaaggcgagccgaaccccactcctcggaaacgccatagtacagcaccttgccttgggcgaccaggtcgctcatcgcgcgcaaggtctcggtaaggtcggtggtctcgtcaaaacggtggcagaagtacatgtccagataatcggtctgcatgttcttcagcgtctggtcgatgctctcgaaaatgtgcttgcgggacaggccgcggtcgttcacgccttcgccggtggggaagtagaccttgctggaaatgaccagttccttacgcgggtactgcttcagcgtcttgccgaggaagcgttcggccgcgccgccagaataggcgtccgcgcagtcgaagaagttgacgccggaatcgtaggcgagcttcacggtctccttggccacgtcctcagccgccgtgcccttgagatccgtgacccagctgcccagtgcgacctcgctgatcttcagtcccgacttgccaacgctgcgatacttcatgtgtgctccttgataatcaatcgtcaccgtcgtctcttcatggccggccgtgaacgctaacaattcttattgaaacagttcaaccccacttgaacgcaagttggcggctattgcgacacgccggtggtgacttcgcgggcgcaacgaatgaaatcatcaatgacgctccaccgatacgatgtggccggaacgccgaactgaatggcatatgcggtatccgggccgcaatccagcacgcgcaaagtacgcaaccgttcgccgtcaagcagcgctggcaggaaccgctccgggcataggcaggcacccatgccgtaatggcacagttccagcagagtcagtacgttatccgaacgggctgtgactttcggctcaaaaccggcacggcggaacagcagatcggcaatgcgtccgtcaatatcttgtgggctgcctaggagaaacgggcaatgctccagtgaggaaaggtcacctgcggcaatggcgcgctcgtccggcgcggttctgatggcatcgacttggccattcgccgcgccaccggtagcggccaaatccatccacagtgattgtgcgaggaccagcaccatgcgctcgttatagaaatccataagttcgatgccggccggtttttcggcgaaatccgccaccgccagatcaagatcgccgttcgccagccattgttgaatctgatcgttgcggccctcgacgagttcgacgatgatattcgggcagtcgcgttgcatcgccttcacaatcggcggcatgatcgcccggctgcgcgtgtaggcaacacccacgcgcagtataccggcccgattgccggcgatatcgcgcatctcctgaccgagcgcatcatggtcgcggcggaatcgctgcgcgtaccgggcgaacaccgtgccggcataggtcaattcgagcggcacatggcgtacgaaaagcgtgcatccgagctcccgttccagggcggcgatgtttgcgctcagcgtctgctgcgtgatgcccaaccgtttcgccgctttgctgaagctatgttccgaggccacggcggcgaagtattcgatgctgagaaagttcatggcgatactcccgtgtgcgtggcgtttgcgtggtgtgtgcatgacgtgtcgtggcgcgaatcaatgccacagtatcaaacctgtaatagatatcggtttagtctgtatttctcctgttatcttaggtcatggctcgtgcgaatagcgttgatgtttgcgactgcgggtcatgagatggaatctgagatgaggctgtagccggaagaggagaggatcgcatgctggaagcgggcgcgatgttgctgttctgtgcggtgctgtttgccagcgtcgccctcggctggtcgattattcccgcgctgttcgttggtgtgctgctgttcatggggtatgggctggttcgccggtgctcgctgcgcgcgatggcgagccgtgcggccggcagcgtacggtccgcggggaccgtggtggtggccttcgtgctcatcggcgtactgacctcgctgtggcgggccagcgggaccatcgccttcatcgtggcccattcgaccgcggtgattcacgccgccacggtgattccgctgtcgtttctactgtgctcggcgatgtcggtgctggtcgggtcgtcgttcgccagtgcggcgactatgggcaccatctgcatgtcgctgggattgtcgatgcaggcgaacccggtgatgctcggtggcgcgattcttgcgggcgtctatgtgggcgatcgttgttcgccggtttccaccagtgccttgctggtcaaacagcttacgcatacgaacctgttcaatactattgcccgcatgctgcgcacgggtgcggtgccgtttgtgctgagttgtgtggtatacgttgcggctgcggtggtggagtggctgtgtgcgagcggtggttccggatttggtgcggctagtgcggctgctgcggctggctcggctagggcggctgtttcaaccaacgcaagcagcataaccgatatcggcggattgttctcatcggccttcgatttgcattggcttaccctagttccagcattactggtcatcgtgttggcgttgctgcatgtggacgttcggctgcttatgctcgccagcattgccgcctcggtcgcgatatgcgtgggcgtgcagcacatggaatgggcggaactgttgcggctgcttattttcggttaccatgcgcaaaatccgcaggtggccgcactcctggacggcggcggcatcctctccatgctcactgtgatggccactgtctgtatctcctccgcctacgccggcatttttgccgagacgcggatgcttgctcggctgcagcaggtcatcgagatgttcggtcatcgcatcggcgcatgtggcgccaccatgattaccgcgacttgcgcggcggcgctcgcctgcaaccaaaccctcaccatcatgctcactcaccagttgtgcggtgggctgtacggcgacgacgaatccgaacgctccgcacaagctatcgatttggaagacagtgccgtggtgatcgctccgctgattccttggtcgatcgccggtgccgtgccgcttgccaccatcaacgcgcccacactcagcctggccgccgcgaccttcctctacctgctgccgctctcgcggatgctcgcctcggctgtacgccgccgctcgggatttcggactcggcatcgatcccaaaatcaaaacccgggactcgccatcccacaccggcccaaacccatgctccacatgttcgctcatggtttccatcctaagtcgggcgattgagcgcacgaggcaatcaggccgagaactgtttgccgaattccgagaagagctgacggcgggcgaagacgagcaggccgagcagcaccagcagggagaccagcccgctgaccatcaccagtacatcccacggagcccagccgagcggaatgaacgtcagaggcatcagaccagcgacgatgtcgaacgccagatacttggcgtactcgtcaatggccttggcccgcagcacgataagcagcaccacgtcaaagaccagcgaaaccagacacgtgatcggtatgacgaacatggtgacgacatgattcatcgtcgccacaaaccagaccagcgcaatcgccagcatgatatagaaatatcgaaacatgaggcgaagcggccgcggcacgtgcagaatcgcactattgatgaacagcacgctgatgatcagcgcggccgccgatgcactggcaatcggtatcggccacgaaaacagatagctgaagaagccatgcagcagcaaaatcgcgccggttacaaacgtgatgatttccaccgccaaacgcctcggacgcagatagatctgctgcgcggggaatgcggcgggggaggcctcgccgcgcaattcgttctggcagagcgggcaacgggccatatcgccggtgaaatcgacggtgcaggcatcgcaatgcttcatgccgacgctcctttctccacatgcacgccagcgatgttcatacggccgctgatgccctgcgcggcgagaatccgacacaggttcttgatgacgttcagatcatggtagatggtggagatgccgatgctcaggtcgtcgccgaacgagcagaccgtgaaattcaggctggccggtgtggtgaggaagctcaccgaacgtacatggcgcgcgagtcgttcgtccaaggtgactcggccaaggttcgagacggtggtcgtggtctcgcggtcggcgatgaaccgggccagctccagcacccagtccttggcaggggagggcgcaagacgcagcaccggattcttttccagcgcaatcatgcggttcatatgcgattcgacgcgctcgcgactggtggcatggccgagctgctcctgcacatggcgggcgatgtcggccaacggctcatcggtcagcaatccacccataccgttgccgtgcgcggtgcgggcggcggactgctggccgtcgccggctgcgtctgggcttgttgcggaagttttcgcggagtcctcatcggcttcgatttcggccggcgtgtacgccacgtaagtcatgccgtagaagttgcgcacggtctccgacctgaagaaggcgcgcaagtcgaccggaatatccacgcgaatcgcgcgattgcgggcgcgcgagggcatgacgtcgcgaatcgcgcacagtatcgcggcgatgaggtaggaggtgagactcactccgcactgatgcgctgcaccaagcaccttgctggcgctgacgtggtattccatgaacgtaggcgcggcccggtcgatggggccggccagccggtagattttcgtgcctggcgcagcgccggccttgtctttctcgtagtatttgtcgaagctgttttcggctttgtcactatccgaaccgtcgtaatccgaaggcacgcccggcacgtcgtaccgctcggcgatgtaggcgtgcagcagtgacttgaacaggttgatggcgccgcgaccgtccgaaatgatgtgcgagacctcgagattgacacgattgcggaaatagctcacgcggaacagcatgcttttgggcccgtaatgcagtcgcgagcatatcggcagatgttccggctccaccagcggccggccgtctgactgttcgaggtaatgccagaacatgccgttgagcaggtgcacgttgaagctcgggaactgggcgatggcatggtcgagcgcgtgctgcaggatgtccggatcgatgtcgtccgccagatcggccgaatagcggaacacggtctgcgaggagcggccagcctgggaggagtagaacttgccgatgttgtctagtcggtaccaagtacgtcttgccacgcgtcgcctccctccggtgcgttggcggtggtgccggtgccgggagctggttccagcggtgtgccgtcgaggaaatgctcgatgattcggtaggtggtggccaccagtcccacggccgacgtattgagcaggtagccgtggatgccatcgtgaattcggtaacaggagacgttgtcgttcaccaattgcaggcgacgggcgtacgcttcgtcctcgtctctgagcgggcagtattcggcggacaacaccagcgtgcgcggctgattgctcaggtcgtgcgcggtcagcggcgcgaaatacggattggtcaggtcggccacggacgaacggtacatgtcgatgtagtcggccatgtcctgtgcggtgaggatgtagtcggtgccgttggtccgcaccgattcgaacgggctggcctcgggattgtagtcgttgccgactaccgggtaaagcagcatctgcgtgcgcggcatgaactcgccgcggtcgcgggccatgagcgagacggcggccgcaagattgccgcccgcgctgtcgccaaacagcacgatgctgtcgggatccggtgctgggattgtcgcagatatatcgcccccgccggcgggggctgtcggcgaagccgactgggggtggtcaacggcggcaacagtaccgccacccaccccggaaatcggcaattccccagcaaacagctgccgggctacctcatagcaatcctcaacagcagtagggaagcggtattcaggagccagccggtactcgactgagatcacacggcgttgcagacgtacggccatatgcgcgcaagcctgcgtgtacaggttgatgccgcctgtggtccaaccgccaccgtggaaaaacaggatcgtgccacgcggcgtgattgagggaagttccgtgttggcattgccgggaataccgtcagcgttgccgctcgacgtgctttccttgatgagtgttttgggcaggactttgggtaacacggcgggcagaatcgtggatattgccgaggccacgggcgtgccattggcggaagactcctccagggcttcgggcaggggcgctccataggcgaccagcggcgtgaacactcgcaatggtacggcatatccatccgccgtaggcgcgaaggcgtcctcgacacggcatttcggattggcgggtgcctgcttggcgataagctcttccgccacgcgctgcaatttgtacgacttgcccgcgttgggcttgatgtagctggcggccttcatcgcggcgaacaatgcctcgttgatcggcatgacgacaggtcctttcagcggcggattcggtagtgcgaacaccccaaccttagcccatgaccggcatgaacaaaaaagggaaggaacccgagagttccttccctgtgtgccgtatcagacgcgatacgcgccgattatcaggcggcgaagtattccacgccggcctcgaagatcggctggtacttgttgccgggcacgttgacgtacaggccgttgccggaacgctccgagtgacccatcttgccaaacacgcggccgtccgggctggtgatgccctcgatggcgagcagcgagccgttcgggttcacatccaggtccatgccgggggtgccggtctcgtccacgtactgcgtggcgatctggccgttggccctgagctgggcgagcacctcgtcggaggccacgaagcggccctcgccgtgggagatggccacggtgtgaatgtcgccgaccgaagtcttggacagccacggggagaggtcggaggccacgcgcgtgcggaccagtcggctctggtggcggccgatggtgttgaaggtcagcgtcgggcaggcgtcggtcatcggcacgatgtcgccgtatggcaccagacccagtttgacgagcgcctggaagccgttgcagatgccgagcatcagaccatcgcggttcttcagcaggtcacgcacggcctcggtgacggccggcgcacggaagaacgcggtgatgaacttggcggaaccgtccggctcgtcgccgccggagaagccgcccgggatcatcacgatctggctcttgttgatctcgtcgaccaacgcctgcgtggattcggcgacggcggccggcgtcaggttgttgacgatcagtgtggtcacatcggcgccggcacgctcgaaggcggcggcggaatcgtactcgcagttgttgcccgggaacaccgggatcaccacatgcggcttggccacggaagagccgacgtacacggtcttcttcggcgcgtggaagtcgatggtctcgacggtcgcgcccttgtcctcgcccttggaacggtacgggaacacggattcgatgccggactcccaagcttcctgcacagcgtccaggtccagcgtctcgccggcggccttgaacacgtactcggaggtggtggtgccgatttcgccgatctcgaccaaattggagacggccggaagcttggcatcgtccgccagctcgacgatgaacgaaccgtatgccgggatgaacaggtcgtccacggcgatgctgtcgttcagggtcacgccgatgcggttgccgagcgtcatcttgaacagggcttcggcggtggcgccatagcccggcgtagagacggccagggcatcgtggaagtcggtgagctcctcgatcacggagaacacttcaagcagcgcatccttgtccggggtcagaccgtcggccaggtagcgcggcgcgatgcgtacgatacggtgatcggcgtccttgaattcaggggaggtggcgcgcttcatgttgcccacggccacggcgaaggagatcagcgtcggcggcacgtcgagatcctcgaacgaaccggacatggagtccttgccgccgatggcgccggcgcccaggtccacctgggccatcagcgcgccgagcacggcggccgccggcttgccccagcgttccggctcgtcgcgcagcttctcgaagtactcctggaagctcaggtaggccttctcatgctcgaagccggccgcgaccagcttggccagcgactcgaccacggacaggtaggcgccggtgaactggttcttggacatgatgtacgggttgaagccccacgccatcgccgaagcggtggtggtctcgccgaacaccggcagcttggcgaccatggccatgttcggggtgagctgacgcttgccgccgaacggcatgagcacggtgcccgcgccgatggtggagtcgaagcgctccgaaaggcccttgttggaggccacgttgatgtcggtgaccagcttgttcatgcgttcggccagcgtgccctcgccccacggggtctcgtaggactgctgtgcctcgacatgcacggtctggtgcttggaagcgccgttggaggccaggaactcacgggacagattcacgatcttgtcgccgttccaggtcatcaccatgcgcgggtcctcggtcacggtggcgatcaccgtggcttcgaggttctcttcgcgggtgtaggccaggaactcgtccacgtcctcggcggccacgtccacggccatgcgctcctgggattcggagatggccagctcggtgccgtccaggccctcgtatttcttgggcacggtgttgaggtccacgaacagtccgtcggccaactcgccgaccgccacggacacgccacccgcgccgaagtcgttgcagcgcttgatcagacggcaggcatcgccgcggcggaacagacgctgcagcttgcgctccaccggagcgttacccttctgcacttcggcgccgtcgagctcgagcgattccacgttatgcgccttggacgaaccggtggcaccgccgatgccgtcacggccggtgcggccgcccagcaggatgatcttgtcgccgggggccggggtttcgcggcgcacatggtcggccggggtggcggccacgaccgcacccacctccatgcgcttggccacgtagccggggtggtagatctcgtcgacctgaccggtggccagaccgatctggttgccgtaggagctgtagccggcggcggcggtggtcacgagcttgcgctgggggagcttgccttccagcgtctcggagaccggcacggtcgggtccgcggcgccggtgacgcgcatcgcctgatacacgtaggagcggccggacagaggatcgcggatgcagccgccgatgcaggtggccgcgccaccgaacggttcgatttcggtggggtggttgtgggtctcgttcttgaacaggaacagccagtcctcgtcgtggccgttcacgtcaaccttgaccttgacggtgcaggcgttgatttcctcggactcgtcaaggccggtcaggacaccgttcttcttgagccacttggcgccgatggtgcccatgtccatgaggcagacgggcttggcgtcacggccgagctcgtggcgcatcgccaggtaacgctcgaaggcggccttgacgggggcgtcatcgatggtcacttcgtccagctcggtgccgaacgtggtgtgacggcagtggtcggaccagtaggtgtcgatcaccttgatttcggtgatggtgggctcgcggctctcctcgctgaagtacttctggcagaattcgaggtcggccagatccatggccagaccgcgctcgtcgatgaacttctggccggcttcggcgtccatctcgttgaaaccggcgatggtctcgaccttgccgggcaccggcacctgggtcttcagggtttccttggtctccaggctggcctcgcgggcctcgaccgggttgatcacgtaatgcttgatggtgtccacgtcggcgtcagtcagttcgccttccagcgcgtacagcttggcggaacggaccgtcgggcgctcgccctgggagatgagctggatgcattcggcggcggagtcggcgcgctggtcgaactggccgggcaggaactcggtggcgaagaccttggcgccggcgaagtcgggcaggtcgtaggccacattgtccacctgaggctcgctgaacacggtgggtacggtctggtcgaacagctcctgggagatgccttcgacgtcatagcggttcacgatgcgcagggccttgaggccggtcagtccgagaatcgtgcgcagttcgcccgcaagctgctgggcttcgacatcaaagccgggcttcttttccacgtacacgcgaaaaaccatggaaatcctttcttgaaattaaagacaattggctcccctcgagaggggagccagataatgcattactcggcgacttcgatgccttcggacttggcgagttcggcgaggcgctcctcgatctcttcgtaggccgggatgatgctgccgagaccacggcggaacaggtccttgtcaaggtgctcgaccttgccggagtggtccttctggtcccacagacggcaggaatccggggtgatctcgtcggccaacagcagcgtgccgtcggtggcgcggcccatttcgatcttgaagtcgaccagcttgacgtcgatcttggcgaagatctcgatcagggcctcgttgatcttgcgggccagcggggcgatctcggcgagatcctcgcgagtgcatacgtcgagggccaccaggtcatcgtcgttgacgaacggatcgtgcagatcatcgttcttcaggaagtactcaagcaccggctccttgagcggcaggccttcctccacgcccagacgggagcagaagtggccggcggccacgttgcgcagcacgatctccaacgggaacatgttcaccttgcgcaccagctggccggtgtcgtccactcgcttgataaggtggctgtcgatgccgcgcttcttgagcaggtcgaagatgatggtggtgatgaggttgttcagacggcccttgccggtgaagtcttccttcttttcaccatcgccagcggtggcggtgttcttgtattcgacccacagaacctcgggatcgtcggttgcgtacagttgcttggccttgccctcgtagagcttttccagcttctccatgactcacctttcaggagtggaatttctgggtgaactaacggtaaaagggtaccaatcgagggctacaacaacactcagcatgacgctacgatgcggccggcgcatcatacgtcgctgcatcgaacggccatacgctgttgggatggcggaggcggccgtcattggccagtacgatcagctcgtctccggtcgtgtagccttccggcatgaaggtatctgcagaagcgcgtgtgaatactcagatgttcgtcaatagacgaaacatgactcttcggccatatacacacgataatgggagtgacgaaatggtacaaggaggttcgtcatgatcgttcatccacgacccggacggcaataatattgaggccatgctgagctgatcaggccgtggactactccacggtaatcgtcaacgcatcggccacgaggccggccttggcacgggcgtcggcttcggactcgccgacggccagtgccacggccatgcggcggtggccatgcacttcgggcttggcaaaaatgcgcaggtccgtgccgggtccggccagagcagcggccacatcggtgaactcggcctcaccgtcgccggccaccacaatcgcatggcttgccgccaccgagccggccggaatcgtgagcgccacatgctcgggggtgatcggcaggccgagaatcgcgcgggcgtgcagcgcgaactcgctcagacgctgggaggccatcgtcaccataccggtatcgtgcggacggggggagacctcattgaacagaatcgagccgtcggtgagcacgaacagttccacgccgaatacgccccaaccggtttcgccggccgcctgagccttggccaccaagccttcaacggcggtacgtgcgatgtcgcgcgcccgctcggcctcaccatcgggttcggtagccggctgccaggactcgcggtaatcgccggactcctgacgttggccgatcggcgcgcacgtcacaatgccggcggacgaagaaacagtcagtaccgtcagctcacgctccagcggggcaagcgcctcaacgatcacgcgcgacacatcgccctcatcggcggcgcgacggccctcctgcgcttcggtccaagcggcatcgatggcgtcggcggaacgcaccaccgactggccgtgaccagacgagctcatcaccggcttgaccacgcacggatagccgacttccgaagctccggcgcgcagctcttccagcgagccggcaaaacgatacggtgtagtcggcaagcccaattcttcgtgggccagtacgcgcaggcgctcgcggtccatgcaaatcgtggcgatttcggcgctcggcaccacctgggcgcccgctgccgcaacaccggccagcacatcggtggcgatggcctctacctcgggcacgatgatgtccggcttgatttcatcgaacaatgcctgcaattcggcggcattcgccatatccaacgcgcgatattcatgcgccacctgctgggccggagcgccggcatacgagtcagcggcgcacacccacgcgcccagtcgcatgagctcgatggccacttccttgcccagctcaccagcgcccaaaaacagcacgcgggtggggtgcttgcccagcggtgtgcccagcgggcggttggctgcgcgagttgcgggggagacggcggaagtctcggcgggaattgcgggagaggaggtggaagtcacggcagtatttacggcgttctcagtcatacccacattctgccatgccgcgatgatttcgcctatgcggggctcgaattcggcggcgtgcgctcgctgagcctgctggagattccgggtgcgctgcggagcgcgtgattcaatattgggcaaaatgcggcagcccataccatttcacacgcgttcaggccgcgcggccgacgccattgcagcgcggtggtttaggatgaggcaatgcgcgaaaacgggattgaagagagcattgatcgtccgctgactatcgctcttgtggtcgatacggtgggcaatcagggcaacggcacctccaattcggccttgcaatgggctgcagaattggagcggcaaggccatcatgtgaggcttgtcggtataggggcgcccgaatatccggcgcgcgtgaataaggtgccgctcgtctcgtgggtggccgccaagcagctcatgcaattcgccgagcccagcgacacgttgttccgcaccgccttccaaggcgtggatgtggtgcatatctatatgccgttcaaattcggccgtcgtgccgctaaagtcgcccgccaaatgggcattcccgtgactgccggattccacctgcagccggagaacgtgctgtattcggccggcccgctacgtcgcattcccggtatttccagcttcctgtactggctgttcaagcactggctgtacaagcacattgaccacatccatgtgcccaccgaaatgaccgcgagcctgttgcgcgcgcacgggtataaagccaagttgcacgtgatttccaatggttattcaccggtgtattcgccgaagaagccggccgatccggatgcctcggctcccgtgccgttccgcgtcatcgcttccggccgactggctagcgagaaagatcagattacgctgatcaaggcggtgtcgatgtcccggcacgccagcgatattcagctggtgatcgccggtactgggccgctcaagcagtatctcaagttccgcgccgggcgtttgctggcgcgcaaggccgatatcggattccacaagcacgccgatatgcccgatttgttgcgttcgggcgatttgttcgtgcattgttcgattgccgacatcgaatcggtgagcgtgatcgaggcgatggcgtgcggattggtgccggtgatcgccgcgtccgaactgtcggcggccagccagttcgcgctgatcgacgagtcgttgttccccgtgcgggacgcggccctgctggcccgacgcatcgattggtggattgcacatcaggccgagcgcgccgaatggggcgaaaaatacgccgaatacaccaaggcgcattattccgtggaagcctcggtccacaagtttgtggatatggaacgcaaggcgataggggagtaggagccttctcgtttgcggagaggtctttcccccagttcgcctgcggcggccagccccctcatcagagggagctacgaaaaaacctccctctgatgagggaggtggcatcgcgaagcgatgacggagggagagattagcgaagggttttacaacaactcaataagttgatcgacctcttcaggcgtggtggcccagctggtgcagatgcgcatcacggtgtgcgtgtcgtcggccttttcggtaaagccgagcttgacctcgcgctccagacggtcaatggtcggctgatccatcgtgacgaaaatctggttggtgggcgcctcgaaagtgagcgtgtagcccttgacgcgcagggcctcgcgaatacgatcggccgcctcattggcgttgcgggcgatcttgaaatacaggttgtcggtgaataaggcgtcaaactgcgcgcccagcacaaagcccttggccagcaaggcaccgtgctgcttgatgagggtcaagaagtgcttcggcgtgttgtgcttggtaaacaccacggcctcgccgaacagggcacccaccttggtaccgccgatgtagaacacgtcggcgatggtcgccagatccgcgagcgtcatgtcggaaccggtggcggtcagcgcgtagccgagtcgcgcgccatccacgaacagcggcatatcgtacttatgcgccacatcggcgatggcctgcaactcggccttggagtagatggtgccatattcggtgctttgcgagacgtacacggagcccgggaacaccatgtgctcgtagttgccgtccgcatagaaggtcttgcagaactcgtccagttcggtcgggtccattttgccgttgtgctggggaatcgtgagcaccttgtgcccggagaactcgatggcgccggcctcgtgcacgttcggatggccggaggcgaccgcgaccacgcctgcatacgccggggtgatggtgtcgatgacgacctggttggtctgcgtgccgccgacgaggaaccacacatccgcgtccggctggccgcaggcctcgcggatcttggccttggcctgatcgctcagttcgtcggacccgtagcccgaatacagatggttgttggcttcagccacggcttcaagcaccgcgggatgggcggcgcgggagtaatcgttctcaaaagacagcatgacggaccttttgtccttatgttcggtgaattggatatgccctgagtgtacaacgcggtggttcccggcatgcctatttggcctataacccaggagcggggaattcagggagaaaaaacaaaacccttccgcgaacggaagggttttactggggtggccaacgcggctcgaacgcgcgaccttctgaaccacaatcagatgctctaccaactgagctatggccaccatagtgccgtattcagcaagctgaattcgcgcaacaggtgaatactatacacaactttgcggatgtgtgctcatcggtgtgtcgcgatggaatcaagtggtcggcttcattcttggggccaggctgcgggctgtctcagatggcgggatgtggatgagtgggtcttgtgcggcgattgatgaaaagtcaaggcacacgacggtgtgatggtacgaccggggattgcagaaatgattacgtgagtgttcgcaatgtgagcattatgtttcatatcaaccgcgacccgcctagtttcatgcgatgttacctacaccaaacaagggaagagaaacaccatggaaaaggttaaagcctttgcagattggctgaccaagtggtttacggtcatcgtcatcgtctgggccgtcttcaactacttcgtgccggccgccagcttgtggggcaaggcgtacaccggctacatgctgggcatcgtgctgttcggcatgggcctgaccctgacgctggacgacttcaagcgcatcctgacccagccgctgatggtcatcgtcggcaccgtagctcacttcatcatcatgccgctcgtcgccgtggccctgtgcgcgatcttccacctgtccggcccgctggccgtgggcgtgattctcgtcggctgctgcccgtctggcacctcctccaacgtgatgagctacctgtcccgtggtgacgtggccctcgatgtctccatcggcatcctttccaccctgtgcgccccgttcatgattccgctgctgatgcagctgctcgcttctcagtacgtgtccgtgccgactcagtccctgttcctcaacgccgtcaaggtggtgctcttcccgatcgccctcggtgtgatctgccacatgatcttcggcaagaagatcgagaaggttacggtcgccctgcctatcgtttctcaggtggctattctgcttatcatcggcgtggtcgttgccgccaacggtccgaagctgttcgtggccagctccctggtggccatcccggtggtcatcctgcacaacctgtgcggctactcgctgggcttcggcttctccaagctgatgtacaagatctacccgaagggcttccgctacgcacagcagaaggccatcaccttcgaagtcggcatgcaggactccgctctgggcgcaaccctggccctgacctccttcgcaaccaacccactcgctgccgtgccgtccaccttcttctccgtgtggcacaacatctccggctctatcctgtccagctggtggcgcaaccacgatgacaagcacgagatccactgggattccgacaatggcgagaagggctctgccaagagcaccgtttcagcggcccacccgttcgacgccgataaggccgccaaggtcgctgcctgaaatcctgaaatggtgagaaaggtcgggtaaggcacgactccagtcagtcggtcatccacctttcctacctcgcataacatagccgctcccgcttactcccgattgaggtatcgggcgtttcgcgagggcggttttgctataattggtaatgcagaaagcggcaaggtaatacggcaaagaggccgggtcgctagaggttcccatcggatatggaagagcacgaggatgtgctggaaacagataacacagaagcggatgtggtgaaaagaaacataatgtaacctccttggcggtgcccccgtgtgacatagtctccgcgggggcacctgctgtgtggcgttccctttttgcgacgcattcccgggaatattgcgttgggagaatagttgggtgtgtgttttgcgacgcattggaatattgcgttgggaggagaggaaaagtacgggggcgcaggaggtccccaaaccagtgagttgtggctcggcgcgtcgttgtccggaggaatcgtagtatagatattcgtgtgtgccagcagcacgccttatgtaacaggcgagcatgctgggatatccttcaaaccgctgatcgcacgcagtaatgcgccgacgggaggggcgaaggccatcgggccggtggactgggctatcttttccgattcgtcgggtgccgccaacaggtggataccaagcgagtgtgctgaaaagtgtgggtgcagtgcggcggtcacacaaaagcaagagaaaccactgaatcggagaattcaagttgcctactattgaacagctcgtccgtaagggacgtcaggcaaagccgaagaagtccaagactttggccctgaagggcagcccgctgcgtcgcggcgtgtgcacccgtgtttacaccaccaccccgaagaagccgaactcggctctgcgtaaggtcgctcgtgtgcgcctgtcctcgggcatcgaagtcaccgcctacattccgggcgaaggccacaatctgcaggagcactccatcgtgctcgtgcgcggcggccgtgtgaaggatctcccgggtgtgcgttaccacatcgtgcgtggcgcgctcgatacccagggtgtcaaggaccgtaagcagggtcgttccctgtatggagcaaagaaggcgaagtaagagatatgtcacgtaagggaccttccaagaagcacgtcgtgctgcccgatccgatctacggttccaccgtggtggcgcagctcatcaacaagattctgcttgacggcaagaagtcgatcgccgaagacatcgtctactccgcgctcgatatggtcaaggagaagtccgaccaggagccggtggctgtgctcaagcgcgccctggacaacatccgtccgtcccttgaggttcgctcccgccgtgtcggtggcgccacctaccaggtgccggtcgaggtcaagccgaaccgcgccaacaccctgtcgctgcgctggctgaccgatttctcccgcgcccgtcgtgagaagaccatggctgagcgtctcgccaacgagatcctggatgcctccaacggcctcggtgcttctgtcaagcgccgcgaggatactcataagatggcagaggctaacaaggccttcgctcattaccgctggtaatcactcgccctgagtaaaactaaggaaaaagatggctgaagagatttcggacctccacgacgtccgcaatatcggcatcatggcccacattgatgccggcaagaccaccactaccgagcgtattctgttctacaccggtaagaactacaagatcggcgagacccacgacggcgcctccaccatggacttcatggcgcaggagcaggaacgtggtatcaccatccagtccgctgctaccacctgcttctggagccgtcagtcccacgacaccaaggacaagttccagatcaacatcatcgatacccctggccacgtggacttcacggccgaggtggagcgctccctgcgtgtgctcgatggtgccgttgccgtgttcgacggcaaggaaggcgtggagccgcagtccgagaccgtgtggcgtcaggctgacaagtacggcgttccgcgtatctgcttcatcaacaagatggacaagctgggcgcgaacttctactactccgtcgacaccatcaaggagaagctgggcgctactccgatcgtgatgcagttgccgatcggttccgagaacgacttcactggcgttgtcgacctggttgagatgcaggcttacgtgtggaacggcaccgaggagctcggcgccaagtacgacaccactgagatcccggacgacctcaaggacaaggctcaggagtaccacgagaagctcgtggaagccgctgccgaagccgacgacgacctcatgaacaagttcttcgaggacggcgacctgtccaaggaagacatccgcgctggcgtgcgtaagctcaccatcgccaaggaagccttcccgatcttctgcggttccgccttcaaggacaagggcgttcagccgatgctggacggcgttgtcgattacctgccgtctcctgaagacgtgccggccatcaagggctacaagcccggcgatgagtccgtcgagatcgaccgtcacccggtcaagtccgatccgttcgcggctctggtcttcaagatctccacccacccgttctacggcaagctcgtgttcgtgcgcgtctactccggctccgttgtgccgggcgactccgtgctcgactccacccgcgagaagaaggaacgtatcggcaagatcttccagatgcacgccgataaggaaaacccgatggaccgcgctgacgccggtaacatctacaccttcgtgggcctgaagaacgtgaccaccggtgacaccctgtgcgccatcgacgatccgatcaccctcgactccatgaccttcccggatcctgtgatccaggtggccgtcgaaccgaagaccaaggccgaccaggagaagatgggcatcgccctgtccaagctggccgaagaggatccgaccttccaggtcacgaccgacgaagagtccggccagaccctgatcgccggcatgggcgagctccagctcgacatcatcgtcgaccgtatgcgccgcgagttcaaggttgagtgcaaccagggcaagccgcaggtcgcctaccgcgagaccatccgcaaggccgtcatggaccagggctacacccacaagaagcagaccggtggttctggccagttcgcaaaggtcctgatgaacttcgagccgctcgacaccaccgagggcaagaccttcgagttcgagaacaaggtcaccggcggccacatctccgccgaattcatcggccccatcgaggccggtgtcaaggaggccatggagtccggtgttctcgccggcttcccggtcgtgggcgtcaaggccaccgtcaccgacggccagatgcacccggtcgattcctccgaaatggccttcaagctcgcaggttccatgtgcttcaaggaagctgccccgaaggccaagccggtcattctcgaaccgatcatgaaggtcgaagtccgtacgccggaagagtacatgggcgaagtcatcggcgatctgaaccagcgccgtggcaacatccagtccatgaccgacggtgtcggcgtcaaggtcatcgacgccaaggtcccgctgtccgagatgttcggctacatcggcgacctgcgttccaagacccagggccgcgccatgttcaccatggagatggactcctacgacgaggtgccgaagagcgtctccgaggagatcatcaaggcccagcgcggcgagtgacacgcgccactgcatgaagtagccagtgtctccagtcagcggtaatatcgtataccgctgactgggttctggctcttcaaagtggcacataacccagaaacccagtagaataagcgagtccctgtgcgaaagggtgcaggaaactcacgagacgtccaggaggacaaaagtaatggcaaaggaaaagtacgagcgtactaagccgcacgttaacatcggtaccatcggccacgtcgaccacggtaagactaccctgactgccgccatctccaaggtgctgcacgaggagttcccggatgtcaacccggagtacgacttcaaccagatcgattccgctccggaagaggccgcccgcggtatcaccatcaacatcgcccacatcgagtaccagaccgagaagcgtcactacgctcacgtcgactgcccgggccacgccgacttcgtgaagaacatgatcaccggtgctgcccagatggatggcgctattctcgttgtggccgccaccgacggcccgatggcccagactcgcgagcacgtgctgctcgcccgtcaggttggcgttccgaagatcctcgtcgccctgaacaagtgcgacatggtcgacgatgaagagctcatcgagctcgtcgaagaagaggtccgcgacctcctcgacgagaacggcttcgaccgtgactgcccggtcatccacacctccgcttacggtgctctgcacgacgacgctccggaccacgagaagtgggtccagtccgttaaggacctcatggacgctgtcgacgactacatcccgaccccggttcacgacctggacaagccgttcctgatgccgatcgaggacgtcttcaccatctccggccgtggtaccgttgtcaccggtcgtgtcgagcgtggccagctggccgtcaacaccccggtcgagatcgttggtatccgtgcgacccagcagaccaccgtcacctccatcgagaccttccacaagaccatggacgcctgcgaggctggcgacaacaccggtctgctgctgcgtggtctcggccgtgacgatgtcgagcgtggccaggttgtggccaagccgggctccgttaccccgcacaccaagttcgagggcgaagtctacgtgctgaccaaggacgaaggcggccgtcactcgccgttcttctccaactaccgtccgcagttctacttccgcaccaccgacgtcaccggcgtcatcgagctgccggaaggcgtcgagatggttcagccgggcgaccacgctaccttcaccgttgagctgattcagcccatcgctatggaggaaggcctgaccttcgctgtgcgtgaaggtggccacaccgtcggctccggtcgtgtgaccaagatcctcgcctgattttcatcagacaagaatcttcgcttgaactagcgttatagaaaatccccttcgaggaaactcggaggggattttctataaccgcaacaggatatggatatgtaccacgacttccggcctggatgcgctagtgttgctttccaatagataaacggactgctgcactgcgaggatatgacactgatggcaggccgggaaagaaggtcgatgatgactggtgcacaggccgctcactgtggttccgtatccgcaatttcgctgggactgcccgtttccacggcgattcccgaagccaaaggcacactgccgaaagccttgttcgtaggcaaagcgccgatttccggcaaactcaagcagcgattggtgaacgagatcgaatccatcaccatgctggcgttggcccggtcggccaacacggggcttgcggacggcaaactgatcccggaagtgctggtcatcggactgaagcttacggccaaagccaccggcataccgaacgaagtcatcgacctgatcgccggacagcgcaaatcgggcatcgtgttcgtgtgcgtacgcgacgtgccgttcgagggcagcacgcgtgaggaatgcgcgttcgccgtgcgccgcgccataccggggcgtgccgggcacacgccgatctatcaggtatatgccggcgactggcagccggcgggggaggcccagctggagcaggccggctctactattgatgagatgtgggcatcgctgtgctcacagaccattttgggtacgccggaggtcgagaatctggatgcgcgcatcattcgccatactgaaattgctcggctcgaatccgaagtggacaagctcactcgtgaccatcagcgcgtcaagaacccggcccagcgcaacgaaatctatgccaaactccacaaggccaaggcgcagctcgcaaaactgcgcgaggcatagtggtgtgaaagccattgggcttccgctggcgggagctggctcgcgaagcgagactgagggtggtccaggtccgtggcctagggctacgcccaagctaattgaaatattcgtgcatcatacagcgtacagttaaaccatgttccctctgctcgaaaccctggtcgccgtatacgaggtgggtcagttcacgctggccgccgatgagctgaaggtatcgcagtcgacggtgtcgtcgcgtatcgcccaattggagcagatggtcggcgcgccgctgttcgtgcgcaatgcgaaaagtgacgtgacgcccacacaggccgggcggatgctgtaccagactgccatcggcatcgacggattatggcgggatacgcgtgagcagatcgaccgcgtgcaggaggcgcgtgagccgctggccgtgtcgttctcgcacacgaccgcggcgattctgctgccgaaggcgttgccggtgatggctcggaacatggacggtttcgacttcgctgtacacgtgatgaactcggatgcgattctcgaacaggccagcatgaaggccgtgcagctcggcgtggtggaaaagccgatcgtgaacgattcggtggaccgcgtcaccctgtgcgaggaccggctggtgttggcgggggagcctgacggcgtgtggatggtgcgcgaacacggttccggcgtgcggtattacacggatctgtatttcaagaccgctcaggttgtgcctgcacgcacgatggaagtgtccagtaatgcggcgattgtggcggcgctgtccgccgggttcgggcagtcgttgatttcggaagccgccgtgccggcgggcgtgccggtgcagcgggagcttggcgatgagtttgtgcggcggttctatgcgctggtgccgagatccggtctgacgcacgatcagcgggagttggcggagacgattattgctgcgctgcgcgggtagtcagatagtcgactgaggggaggttgcgaacgttgtttctctccctccgtccgcctgcggcggccacctctctcatcagagggagatcaattaggtatcgacaaaatcgatgatatgtattggttgcaatgatttgaccgatgtaaacgcttgagcttcaatagacatcatgagagagttctgtacaaaatggtggaagcgcattgccaccgttgacatgttgttcattggtgttctgactctgctggcctcgctgttcgcctcctggctcaagcagttccccggattcagcctgttcggcgcgcttatcatcgcgctgctcatcggtatgatcatccagttcccgatccgcagtgcctacgtcggttccaatgatggccgcaaggcaggcgtcaaggacgccgctggcctgatttccaacaagctgctgcgcctcggcatcatcctgctcggtttcaaactcaacctcgccgtgctgttcacgcagggcatcaagtgtctgccgatcgccgctgtggtcgttacgctgaccatcatcgtgtgctatgccatcgcccgcaagctcggtgtcgacccgatgctcgccatcctgaccgccggtggcaccggcatctgcggtgcggctgccgtcatgggcctggccggttccatcaaggtgcctgaggacaagcaggacgagaaggacaacgacgtgaccatggccgtggccatcgtcgccatcatgggcactgtgttcgcgctgatcgagattgcgattggcccgctgcttggcctgaccaagacccagctcggcgtcaccgccggtgcttccctgcacgaaatcgcccacgcggtcgccgccggcgacgctttcggcgcggtggacatcgccaccatcatgaagctttcccgcgtgctcatgctcgtgttcgcggccatcatcatcgccatctggtgggagaagaagcactccgaggtggagaacaccggcaagaagaccgtggccttcccgtggttcatgctcggcttcatcggcgcttcgatcatcggcaccttcgtgccgctcatcgcctccatcaccccgcagcttgtggactttgcgtacatcgtgctcggcatggccatggccgcgctcggcatcaacgtgaacttcaaggccatcgcttccaagggcaagaagccgatgctcgccagcttcctgacatcgattctgctcatgtgcttcgccgcaggtgtcgcgatgctgttcttctgataagcgctccaaatacaaataggcgaaggcgaacgacagtgagcaattggaatgtgtcacctaaaaatcacgtacttgcacaacggataaccccagccgaactggcaggccatcgcaatgaacttcaccacatatggactcagcccggtcgcacccggcatccagccgatcagcagcgtgctgaacgtgaagttccagatccacagcagcgcgaacagcgccacggaacgggtgaagttgctggacgatttgaatgtcacgttgcggttcatcacgaagttgtaggtcgccgaacacaccacggcgatgccgttggcgatctgtgagggtacgccgatcaagtgcagaatggcgaacgtcgcatactccacaatggtctgcgtggcggaaacacccacatacttgcccaacacggcgagtccattttgcttcggggttgccgggcccacggtattttccgcagtattcgttgtggttgaggtatttgtggcgcccacaccttgattcggcttcacatccgctccattgttcgccatgcccatatacctcccggatgtacctgtgacgttcgacctcgcaatgataccgctgaccgcgtcgggaatcggcgtggcggtcagacgagaaaaccgcaggccgcagcaacgaccggcacacccagcgacagcaccagataggccgctgcggtggggtagcggtgtttgcggaagagcgtcaccatttcgttgattgcggtcgagaacgtggagaagccgccgaggaaaccggtggccagcactagccgccatggttcatcaagtgtcccgccgagtgccagcgccgcgaccaaaccggctaggaatccggcgatgagattgatggtgaacgtggaaagtgggaatgcgcgctgccagtacgttttgatggtcacgtcaagcagatagcggcaggaggcgcctacgccgccgcacaggcagaccaagattggtaggaatacggtcatcacgccttacctcccttgctggtcgtaacggcattcgtatcagcggacgcttcggcggatacgttcgaggagccggccagatgcgttcctgcccacacgccggcagacgcacaaaccagacccagcgcgaacgtcaccagtagataggcaatgccggccgccacctgaccgtcgcggattgcggtaaaaccttccagcgcgagtgtcgacatcgtagacaaaccaccgcatacgcccatgccgagtccgcgactggcaagttctttggaacgtgcgccgaaccgggaagcgccggccaagtaagcggtcaaccctgcatagcagaagcaagccagcatgttggccacaaacgtgccggtatggaagctgccagccgcgggaatctgtgcgaacgcatagcggatagcggtgccgatcgcaccgccgcagaagacgaccaacacaatatcaagatgaatatcggggagcttgcgcgccgggggagtggtcgtgtgcgtaatcggccgggcacctgcggatggggattgcgaacccatagtagcctttcctgaaaccgctgaatcctgctgaagacacaacgattccatgcaatatcaaatcgtgtgtaggaactatcagcagtgtgcggttcgaaacgagttcaggcgggttccatcgccggttccttagcctactcgtggcggcgacaacaaacggcagcagtatctcggatattggcctatcgcggtggatttcggcaagagacttctgcaatgccgatgaacttggttgccgtgaggcgataaagcacgtagatgaattgcttggttgcttccatacctcgtgggtatggctcaacatggtttatggctattggttaatacatgtcgattgtcgtttaatggaacatgaggataacgggccctaatcgctcggtgccggaaacaaggagttgtgaatatgtctgaaaccatgaaagccgcgattttcgttgagcctggcaagatgaccgtggaagaagtgccaaaggcggcacttcagcaggatgatgacatcgtaattcgcatggtgcgcacctgtgtatgcggctctgatttgtggttcttccgtgggctgagcggacaggccgcacacagtcaggtgggccacgaagctattggcgtggtcgaggagactggcgcggcggtcgaatccgttaagccaggtgatttcgtggtcgtgccattcccgtacagctgcggcaagtgcccggtatgcaaggccggcttcgaatccgtgtgcccgcacggcggctacttctccgcttgtcaggccgaatacctgcgtgtgcccgaggcggacggcaccgtggtcaaggtgcccggttcaccggaagattattccgatgaacagctcgcatcgctgctgaccatttctgatgtgatgtccaccggttatcacgcggcggtttctgccgaggtcaagcccggcgatacagccgtggtcatgggcgatggtgcagtcggcctgtgcggtgtgattgccgccaagatgcgtggtgccacgcgcattattgccatgagccgtcacgaggatcgcgcggcgctcgcccgcgaattcggtgcgactgatatcgtgcccgagcgtggccaagaggctattgacaaggtgctggagatgaccggtggctatggtgcggacgcggtgctcgaatgcgtgggctccaagcagtccttcgacacggcgattggcctgattcgccgcggtggcgtgattggtcgtgtgggcctgccgcacgacgtggagatcagcgccgaaggcacgttctacggcaacatcggcatcaagggcggcccggctcccgtgcgccactacgatattgacggtggtctgctggatgcggtgcttaaaggcgagattaaccctggccgcgtgttcaccgccgaatatgacctcgaccatattcaggacgcttatgaggccatggaccagcgcaaagttattaaggcgttgatccggttctaatcgcgtggtgtgacggggtttaccgcagtggtatttaacgtccgtgtgtatgcgtcccctttgtagggccgcatacatacggacgttgtgatgtgtctgacgcggtttacgctgaacgattgtggtgacgcaaaccggtcacctgttactcggcgagcagtgccttgtactgtgcagcggactgggcgagggcctcgtcggtgatgccgaaagcgccgcacgtggcgaacggcttgagtcaggtcgcgccgatgtataagccgtgccctcgatcggaataagcagctgctcgatggggtagtggccggggtgccggtctggtaggccgattccggcgaaccggtggacactgcgcatcgcgccgggaaccgtggccaaggcgtacgccgaactcgccgactgcggcatcatcgacaccggtgccggcctcgcggcgcgtgtaaaacgggtcaagccgattcccgaaccgctggtgcgcgcggccaagacctatgccgacgaggcccgccggcttggcgcgagcctcgatgacgccttcaacgccctgtgcgcgcagtggtaaagcgcgcaccgatgcgaagcctacacggggtgcaccgtcagcgaaaagtcgccgatggtgctgacggtcgagggtgaggccagattgcagacatctcgcaagcagtacgtggcatacagcggaagataggttgttccgccgtcctgcgcaatattggagcgggacagcaccacgccctgcgagatgcgatattcggcattggccaatacggcgtcgatggcggcgtgcgtgcggtagctgcgccccgacttgacctcgaacggcatcacagaatcggcgttcgtgtcagcgatgaaatcgacttcaccatgtttctttgccatatagtaatacagcggaatgtcttgcgccgtcagctcctgagcaatcacgttctcgtagatggcacccagattcggtgaggaatcatcaaggtatgcggcttgcgcggtcggttgcgggtatcgtgccatgagcataccggtatcagactggtacagtttgaacttcggtgattgcgccgtgcgtttcaatggcgatttcggctcggtgacgcagttggttttcaatgccacacccgcatcgacaagccaaagaaaatccttctgattgcggtcgtaccgagcaccggggctgatggaggagacggcgaatctgccgttaccgtcaatcagctgagtggggagctggtcgaagatctcctgcacctgcaatgcgcgattgcctgcgtactgcgaaatatcgtggcgatattgccggttcaactcgttctgtaccgcgcgcacagccgccaaatcacccttggtgtccagaaaacgttgcacgacttccggcatgccgccgactaccagataggtgcggaagttcgtcatcattgcatcgtgaatgtaccggtcgattggcgtgaccgaccggcaggattctcggatgttttcaagtgtcgacttctgtacgccgatggcccaacagaattcctcaaaatccatgggacgcatggttttttcgatgaccgagccaacggggtaggagcgtacgcccttgaactcagtgccgagcatggaaccggagaacacataatcgaaacggccatcggccaccagaaacttgaccatggtcatcacgtccggtgcctcttgcacctcgtcgatgaaaatcaacgtatcaccgggaatgagcgttgaaggtgagaacaaggtaaggcggctgatgaactcctgcacgtcgttcgccgatgcgagcgctcgggccgcctgcttgttctcgtacaggttgatttcaaggtaatgggcgtattcgtgcttggcgaactcgcgtaccgcgtagctcttgccgatctggcgagcgccggtcagcagcagtgctttgccggtaccgctccgcttccattccagcagatcgtccgagattttgcgctcaagcatggcagctcctttccgaatcccttatgagagtagcattttctgccttgtatgtgcaaaatgccgcatttcaaaatagggctttggtgcaaaatgccgcattttaaagtagggttttggtgcaaaatgccgtgtaaatggtgaattggacgtgcttgtaaggggagctggatgatcgtgcggctggatgaccttgtaactaaatgattgaacgattgcgcggccgtcgtttgcgtggccgcaaagttgtgtgggctgttcgcgaattatgcgcggtcggccgtcatgtgcctgcgcttggggtgctcgataagtagcgctcgcttcttggcgtcctcggcggtcgaagccggtacgccgtcggaggaggcgtcgatgatgcgctgcaggtagccgtatagggtgtgcagctcgtcgtcattcagacagtccagcatagaggggcctgatcaaaaccagttcacgaggtcctttttgctttaatccccgctgagagcgcgtagcgccggaggatgatcggatgccgcgacgccgaatcaagattcagccgctcgccgaccagcccgaccagcaaggaaccggattcgcgcatcggcggcatgcgcgctgctattcgcgctgaaacagcatggcatgggtgcgctgacaccgcgccggcgcaaaggccatcagtgaaactggggaatcggattgcaggtggcggacggtgcccaagacgaaagattctcgtccggcgttcagccgccgtcgttggccgtgatgatactggagaccatgaagctcaggcggcggcagccaagggcgaagtcgagaaagaggtgacggcgtgacacttgaacagaggtcagatagcgcggcggcaggccacgaggcatgtgaccagccgatcaggagcctggaaatcctcaaccaatgcgttccgctgttcgagacgctgaaggatccgaaccggcagcagttgctggtgcaattggtgtgccatgggccgcagacggtgggggagctggccgaatcgtcggcactgtcccgcacggccgtgtcccatcacatcaaactgctggaacaagccggattcatcgaaatcagcaaagacgccacccgccgcatttgctcggtgcgtgcggatcgatggctgccgctgctcgatgaactgtcttccgccctgaaagccgaccttgcggcggcggagcagtgccgagcatgagcgacgatcaacggccgcaggcgattgaggtgcgcggtgcgcgcgtgcataacctcaagaacatcgacatcgacattccgctgggcgaactggtgggcgtggccggcgtctccggttcgggcaaaagctctctggcgctcggcgtgctgtatgcggaaggttcgcggcgctacttggaagcgctgtccacgtacacgcgccgtcgactgactcaagccagccgcgcccaggtggacgaagtgctgcatgtgccggccgcgctggccctgcaccagcggcccactgtgcccggcatccgttcgacgttcggcacgatgaccgaattgctcaacagcctgcgactcctgttttcccgcgtcgcctcgcacgtgtgcccgcattgcggggcgcgcaatgaaccgacgctgaacgtggcggccggcctgcccatcacctgtgctggctgcggcaaggaattccacgcgcccggcgccgaattgctcgccttcaactcggccggcgcctgcccgacctgctccggcaccggcatcgtgcgcgaagtaaaccgcgcggccctggtcccggacgagtcgaaaagcatcgacgacggcgcggtgctgccatggggctcgctcatgtgggacctcatgaaacaggtgtgcggcgcgatgggcgtgcgcaccaacgtgccgttcaacgaactcacacccgaagaacgcgacatcgtattcaacgggccggccgtcaaaaagcatattctttacaagccgaagaaaggcgacgatttcgccgaactcgacttcacctacttcaacgccgtgtacacggtggagaacgcgctcgccaaagccaaggacgagaagggcctgaagcgtgtggtccggttcctcaaggaaggcccatgcgccgactgcggcggcacacgactgagcgtcgccgcccgggccccgcatgtgcgcgggctgaacttggccgaagccggcgcgatgaccttggacgcggcggcggattgggtgcgcggagtgccggaatccctgcccgccgacatgcggccgatggccgccaacatctgcgaatcgttcttggatgtggcccgacggctgctcgatctgggcctcggctatctggcgcttgaccgcgccggcgccacgctttcgaccggcgaacgccagcgtgtgcagctcgcccgggccgtgcgcaaccgcaccatcggcgtgctgtatgtgctcgacgagccatccatcggtcttcatccctcgaacgtggacgggctgctcggcgtgatgcacgacttggtggcggacggcaattccgtggtggtcgtggaccatgatgtgcgtgtactcaaagcgtgtgaccatcttatcgaaatggggccggttgccggtgccgaaggcgggcatgtgatcgcgcaaggcacggtcggcgaggtggcggcgaaccccagtagtcgcattgcgccgttcctatccgaccaggtgagtgcgcgtatacgtgaacgtgtggccgaatcgcaagtgttcagccttggccacatccgcatgacaaccagtcagctgcatacggtcaaaccgttggacgttgatatcccgcgcggccggctcgtggcggtgaccggcgtctccggctccggcaaaaccacgatggtactcgaatcgctgattcccgcactcaaagcgcaggcggcgggggagctgttgccggaacacgtgcgcgagcttgagaccgagggcatccgtcgtgcgaatctcatcgatgccacgccgatcggcgcgaacgtgcgctccaccgtggccacttatgccgatattcacgacgaattgcgccgcgccttcgcccgcacggacgacgccaaggcgggcggctggaaggctggcgatttctcgtacaacaccggccgactgcgttgccctacgtgcgacggcaccggttcgatctcgctcgacgtgcagttcctgccggacgttaccatcgaatgcccggattgcggcggatcccggtatgcgcccgaagccggcgcgattcggcgtgccgttaagggagaatctcacctttcgttgagtctgccgcagctgatggcgatgagcgtggaccaggcgctgtccgtgaccggcgacctcaagaaggtccacacgcgcctgaccaccttgcgtgatttgggcctcggctacctgacgcttggcgagccgacaccggcgctttcgggcggcgaagcccagcggctgaaactctccagcgaaatgggcagggcgcagtcggacgcggtattcgtgttcgatgagccgaccatcggtctgcacccgcttgatgtgcgcgtgctgctgggcgtgttcgaccggctcgtggcgagtggcgcgactgtcgtggtcatcgagcatgacctcgacgtgattgccagtgcggattggattatcgatatggggccgggtggcggagaaagtggcggacacatcgttgccaccggaacgccggaacaggtcgcggccaatccgaacagcatcaccgggcggtatctgcgctgacttgtatggcggtcacgcgcctttgcataggaccctgcgcgagtaggatagccgtccatggtgcagattcatggcattagacgcgcaagcgcggacgcgaaatatcggcagatgaccgggcagccggtcaagccgctgatcctcaaactgtgcttgccggccgtcatctccaacttggtgaccaccgcatacaacctcacggacacgttctttattggccagctcggcaccgcgcagtccggtgctatcggcatcgcgttctccatcatgaccgtgatgcaggcgctcggcttcttcttcggcaacggcgcgggcaactcgatgagccgcgaactcggcaaacagaacaatgatcgcgcctcccgactactggccgtgggcttcgcgggcgcggtgctctctggtttggtgattgccacaatcggattgctgaccctgcggccgctggtcgtcatgctgggctcgacctcgacgatcgccccatacgccgtgcaatatctgacgccgttgctggtcgccgcaccctgcgtgtgcggttcgttcgcactcaacggattgttgagataccaaggtcaatcggcgttcggcatgattggtctggtgtccggcgcgctgttgaatttcctgcttgcgccattgttcattttcgtggccggtctgggtattttcggtgccggcctcgccaccgccatctgccagacggtgagcttcatgattctgaccacgatgagccgcaaattcggcgtgatgaaactgtccctgcgcaattgcaaaccggatatgctgctcatgcgcgaagtggctggcggcggcctgccttcgctgatccgccaaggcgccggctcgatttccgtgacttgcgtgaacattgccgccaatccattcggcgacgcggccatcgccggcatggccatcgtgatgcgcatcatgttgggcgccaattcggtgatcgtgggtctcggccaaggctttcagccggtatgtggttacaactacggtgccggcctgttcgcgcgagtcaaagagggatattggttctgcgtgcggctcgccacctgcgtgctcgtggcgttggcagcgctgctgtggattttcgcgccgcaactggttgagatcttccgttccgacccggccgtggtggcggtgggcgtggccgcgctgcatattcaatgctgcacggtgattctcaatggcttcaacatgatgggcaatatgatgacccagaccatgggccgcaccggcatcgcctcgtttctggccttgtgccggcaaggcctgttcctggcaccgattgtgctgattctgccgatgatatttggcgtgcttggtgtggagatggcgcaatcggtgtccgacgtgctgacattcgtggtcaccatcccgttcatgcggcgaatcctgcacgaattgcggtgaatggtagatggcaactatgaataatcgaaggacaaaacgagcgttgcgcattccttttccagaacacatcgaatcgctgtaccgcaccatggctgccgcccttggtccgacgggatggtggccggcggtgttccgcccagtgccttgttcggcgaatcgatggccgaactaacgggcggaccgatggccgaatcgacggatgacgcggcggacgaatcgacggatgacgcggcggacgaatcggcagccgccgtgccgctcgatccagacgcaccgaccgccggatccgccacgcctttggatcttatcgcttctgcgtcgcgcatcgccttgataatgctcaggcacgtcggtttggaagtcgcgcacccgcgcaacgacccggattggatggcgttctggagcatgacgcgattcatctactaccactacggcgaacgcctcaccatcgaagacatcgcccgcgccgacggcatgttactgatgtcgatttgactggccagcaggtcgccgattggagggaaaagggataggggacacagaagcagaggatagatgtcggttcggttgcatcctgcgtggtgagttgttgtccggatggttgcctatatgaaccagtgacaggaaatcaggggaacgcgagcgagaggagcgtgcatggggcagttcggcgtcatgattggccagttggtcggattcctgatcatgctgatggtcgggtatggatgtgtgaggcttcgattttacggtcagacggcgttggacggcatgtgctcgttgctgctcaacgtgctcatccccgtgcttgtgttttcgaacgccgtcgatggtgcggaccgcgcgcagcttgcctctaactggggcgtgatgctgctgaccgccgtgatgtacgcgctgctcatcctggtgttctggctggtcgccgaactgttgcggctcaaaggttcgcgtagccatgtatttcaggcgtcgcttattttcggcaacgccggattcatcggcattccgttgattatggcactttggccgcagaacggcgcgatttacgtggcgctgatgtcgatcatcgaccagacgctgctctggacgtacggcgtatggctgtgcgagccggtcgacgaaacgactggcggcaacgcgattggcgcgcgaggtgcggtcgtgaacggttcggtgaacggcgccggttcggtgggcaatgctggttcggcgagcaatgccgcaaacggtggttctccggccatcgtccgcccctcgccaggcacccgcgtcctcggcctgcttaaacgattcgtcaatcccgccttcgtcggcgtgatgctcgccctgattctgattctgcttggcgtcaaggtgccggacatcatcctgaagccgctgcacaccatcggcaatatggccacgccgatgtcgctaatctacttgggcggcctgttcgcgctgaccaagtggtggggcgtcctcaaacgctacgaactctatgctggcctagtcgccaagatgatcgcattcccgctcgccttctacgcgctactgaccgcgctgaccggcgcattgccgcaactgccgatcacccatgacatggtgctgatgattacggtcatcgccggactgccgaccatgaccaccattgccatgttcaccggtcgcaagaacaacatgcccgagtatgcggtcggcttcgtgctcgtaagcactctgttctcgctggcctccctgacgattgtgtcggcagttgtgttctgaattgtccccttcgacgaaaagaatgccgggggcctccggcgcttggaatctcatcgacgccgccaacgactccaatccgaggtggccgtgccgtatttcaaggagatattcgattacgcgcgcacgctcgatccgcagcatcgcccgctgacctacaccaatatgctgatggccgccggaggcaaagacaagtgccatcagttcgcggatgtcatctgcctgaaccggtattacggctggtacgtgcaagatgggtatcagctcatcggagccaagaaggccttcatcaacgagatgaaccaatggatgaacaccgaacccaacaagccgtttctgttcaccgaatacggtgcggacaccgatgccggtgtgcacaagctgccgagcgtgcaatggagtgaagagtaccaatgcgagtacctcaccatgcagcacgaagtgttcgacatgttcgaggcagtggtgggcgagcaggtatggaacctctgcgacttccaaaccggtgaaggcatcatgcgcgtcgacggcaacaagaaggacgtcttcactcgcgaccgtcagcccaaagccgccgcctatgtactcaaggagcgttgggagactaagtagcggcccgcccctggaatattccaggagcaacacacatcgcataacatacaacgcaacatacaaaaaagaacctcgtgaaacgaatttcacgaggttctttctagttacgctgaatgactcccattagactcccacaagagaagagcaatggcagaattccaacgttgctaagctctcaaactcagatgtggaagtagagctcgtactcgagcggggtcggagacaggcgagcctggtcgatctcgtcgcgcttgaggccaatccaggtctcgatcaggtcgtcggtgaacacgtcgccggcggtgaggaagtcgtggtcctcttccagggcgtccatagcctcagccagggagctcggcacctgcttgatgccagcgtgctcttccggcggcagctcgtagaggtccttgtcgaccggctccggaggctcgatgtggttcaggatgccgtccaggccagccatcagctgagcggagaaggccaggaacgggttgcaggacggatccggagcgcggaactcgatgcgcttggcagccggggaggtgccggccagcggaatacggatggcggcagaacggttacgagcggagtacaccaggttgaccggagcctcgaagcccggaaccagacggtggtaggagttcagggacgggttggtgaaggccagcacggaggaggagtgcttgatcagaccgccgatgtaccagcgagccagatcggacaggccagcgtagcccttctcgtcgtagaacagcggcttgccgtccttccacagggactggtggcagtgcatgccagtgccgttgtcgccagcaatcggcttcggcatgaaggtcgcagccttgccggccagagcggcggtctcgtggacgacgtacttgtacttcatcaggtcatcgcctgcgtgctgcagggtgttgaagcggtagttgatctcctgctgaccagcgccggccacctcgtggtgggaacgctcgagaatcaggccgaccttctgcaggttggcgaccatatcgtcgcgcagatcctgagtgtggtcaatcggcggaaccgggaagtagcccttcttgacgcggttcttgaaaccgatgttcggggtgccgtcttcctcaacgtcaacaccggagttccacggagcttcgatggagtcgacctcgtagaaggagcggttcatgccgttctcgaagcggaccttgtcgaagatgaagaactcggcctcaggagcgaaggaggcggtgtcggcgataccggtggacttcaggtaggcctcggccttgccagcaacctgacgcgggtcgcgggagtacggctcgtcggtcagcgggtcgacgatggagaaggccacgtcaagggtcttgtgcttgcggaacgggtcaatgaaagcggtctcaacgtccgggaccagcttcatgtcggactcgttgatggcttggaagccctgaacggaggaaccatcgaacggcatgccgtcggtgaaagcgtccttcaggaattcgctagccggcacggtgaagtgctgctgaacgccgataagatcggtgaaacggacggagacatactcgatgccttccttgttgataagggcctcggcgtcttccttggacttgagttcggtcacgggaccgctcctttcgtatgaaatataacggtatccatcgtaaaatcgcgcgtttcgccggctcgaaacttgggttacgagaatgtttcgtgactgtggccgacaatcgcgcaggcgcgttatttcaacgaaacatcattacagaatggaaacggaggctatcgggggagtgggtagaggtgtccgcaacgtggacagtggatattgacaggtgacgtaggtggatgtatgtggacgcgattatgagacatatgacgaagccccggaaccgattgaacggattccggggcttctgtgcgatttggtggtgtgctgccgatcagcgaccgcgcatcgcgcggcgggagatcttctgcgggtggttcgggtccatgcccttggggatggcataacccttcttggcctgcagcgtgcgcagacgatcgttcagcgtttccatctcggccttggtcagcaggaagcgacgacgcggatgaatcttggcgatcagtgcgttcttgtggttcgtgggctcatagctcttggacttggtcaccgtgctacgcagcttgtccagtggcacctgcttggggccgtggcccacggagatgcggtacaccggaatggaggagccggcggtgacgcccttgatatcgtgttcctgacgatccatcgccttcatgatgcgaccgtattcgccttcgccgatcaggtagatgccgttcatcgaagtgccgcgccagatggcatccttggtcttcgggtcgatccacaccggttcctgcgggaagttaaagccggctttctgcatgttgctcagcacgccgatggcggcaccaggcttgccgtcaatctgcttgtagccgactgcatccgcgcggcgggtgagcatcatggtggccagtagcatgccgagcatgatggcggtgatcatggtgaagatccaggtcagccaggtccacttggcaatcagaccgatgatgatcatcacgactacaggcagcaggaaagcaccggcctcaagccacggcagggccttgtcttccttagccgtgtacttgtagatctggatgatctgcttgattgtgctctgcttcttcggcttcgcgtccttttccgccatcacttcttcctttgttgggacgaaacacactaggcaacatcttatcaggtgcgctggtccgaacttgtttgtgctggttggtctcagcgtgtgtgtaacggccgtccgtcggccttgagcagcgcctcgccgagcgtttcactgaacgtgggatgcgggtgaacgaggcgggctgcgtcggcgagcggcacatggttgccgaccagctgttcggcttcggcgatgatgtcggaggccatctgggagaccatgtgcacgccgagcacgcgcggggtgtccgggttggccgcgtcgcagccggagacgatggtcagtgaaccggccgtgccgctcatcagcatgcgcgcgttcgccagcatcggatagttggtctccttgatttcaatgagatcctctctcgcctgcgcctgttcgacggtgagcccgaccgacgccgcttcggggaaggagaacacgatttgcggcacggtggcttcgtccaccggcttgggattgagtccggcgatggtctccgcgatgacgatgccttgctcaaaagcacgatgcgccagcgcgtgaccggccgtcacatcgcccaccgcccatacgcccggtttgtcggtgcggccgtacgcatccgtggcgacatgtccgtggtcgtcaatcgtcacgccccatgctgggtcggtgatcgggtcacgcccgatggcgacaagggcgatctcgccccagacgctttgttcgccgtcctggccttcgcgcgcgtagtgcacggtggcaccaaggttcgcgccggtgtccacatgggtgacgctggcgcgggtgatgatgttcacgccatgacgtttgagctcacgggtcagcgtggtgccggctctccggtcccaggctgagagcacacggtccttgcgaatcagcaaggtcaccttcgaaccggcggcgttccacatcgaggcgaattcaagggcgatggccccggcgccgataatcaccgccgacgagggaaattcgttgacttccagcgcctgtgtggagtcgatgagggcgccggcgaacgggttgccgggcaatgggcgtggcttggcaccggtggcgatgacgatgttcgtggccgtgaggtccatcgtggggccgctgggctcggggacatcggccttgtgataggtgaggatgtcgctttggtcgggggaagggacgaggtggacgatgtggttggaagttgctggagcggtctcatccgcatggaacgcggcattggctcggaacacggtgatgccgcgatgggcaagcagtccggccagtcctcccaccatcgtcttgaccacgcgcaggcgatagtcgcgcagcgtgccgaagtcgatgccattcaccgaggcgttgacgccgagctcggccgcacggtgcacggtgtcgatggtgtgggtggcggtgatgagcgccttggaggggatgcagccacggttgagacatgtgccgcctacggtggcgtcacgctcgacgagtgccactttcatgccgagttcggcggcgcgcaaggccgtggaatagccgccggggccggccccgatgatgaccagatcaaactgttcgctcatgattgcctccttgatacatataagtatggctcccacgctagggagccatatgcggctatcgccgccacttcgcctaaaaacggtccactggactgttttctttacggctcagcccctcaacgaggggagccagagtatatatggacaatcagtccgccggccagtgaccgcgcttcgggtaacgcggcttgggaagcctccaacgacgcatctgaatcgaacggctccaagcgtaggagaaggagcgggagcccttggacacggaccgttcgccgtacttggcgatgagcttggccttgagcttgcgccacatcagccatacgtcgatgatcacggcaatcaggtaaccgtacataagcgccatcatgatgatggaagcccactggttctgcatcaaagaagtgacgaacatggaaacgatcagaatcgcgaaggccaccgggatgaaccattcgccaaggttgaaacgggcatccacataatcacggatgtagatacgccaaggcaagcgttccgccttgggcatgtggttgatatcgccattctgcatcgcctcgtactcggcgttctccttctcacgcagacgggctttggcggccttggcgctggccttgcggtccaccggaaccagcggacggataccggcggcctgagcctgcttcatcttcggggtaggacggccttttttctcagaaggattggcggccttcttcggggcctgctcaacaggagcttgggcctcttcttttttcttaaacggattccatgtcatgctttgaggttacggtgacgttcagacacttgtacactggcgtagccattgcaatgacgccgctcacacacatatataaaggaggaccatcatgacaacgctcaccgctgacgagattcgttcgcgcgtcgaaaccgattggaaccgcatagtcaaggtgctggccgaaaaggtcgcgctgcagtcgatctccgccaagggcatcaccgccgaacatatgaagcgctccgctgaattcgtggcagacgaactgcgcctcgtgggtgtggataccaaggtggttcaggcttccaatgccgacggcactccgggcgcatgggaggtcatcggctcgcatatcgtttctccggacgcccccaccgtgctgctctatgcccatcacgacgtgcagcctgttccggacccggccgagtggaacaccgacccgttcgtggccaccgaaatcgacggccgcctctacggccgtggctccgccgatgacggcggcggcatcgccatccactccggtgcactgaaggccctgggcgacgacctcaacgtcaatatcaaagtgttcatcgaaggcgaagaggagatgggctcgccaagcttcattcccttcatcgaggctcaccgcgacgaattcgccgctgacgtgattatcgtggccgattccggcaactggtcggcggacattccttctttgaccacctcgctgcgcggcaacacctgtgtggacgtgaccgtgcagggccttgagcatccggtgcactccggccagtacggcggcccgattctcgactccaatacgttggccgccatgctcatcgcttccatgtatgacgagaacggcgatctggccgtacccggcgtggccgcggaagagccgatcggcggtttgcagcacgaccttgacgaaaccaccgtgcgcaaggattctggcgtggtggccggttacgagttcgccggcaccggttcactggcctcacgcctgtggaccaagccgtccgtgaccgtgatcggcttcgacgcccacccggtcgagggatccttcaacgtgatcgccccggagacccgcttccgtctgtcgctgcgcaccgcgcccacccagcgccctgaagaagcgcaggaagcactggctgcattcctcgaatcccacgcgccgttcggtgccaaggtcactgtcgaacgcggcgaaaacggcatgggctgggccatggacccgaccgccgtggccaccaaggacgcgctggaagccatgaccgaggccttcggcgttgagcccatcaacaagggcgaaggcggctccattccgttcatccccgaactgcagcgcattttccccaacgctcaggtgctggtcaccggtcccgaagacccgaaggccaacgcccacagccccaatgagtccatctccctgcccggcctcaagaacaacgtgatcaccgaggctttgctgctggacaagctcggcaagtagccgaaccgcatcggtaatggtagtgagccgccgtcaggtaggtcacagatgtggctattgcctttgacggcggcttgctttatagtcgggagttgacacgggagctgccgttgggcggctgagaggagactcatagtctcgaccgatggaacgtgaccggataatgccggcgcacggaaatgtcgctcttacctacccgtgcctgaaccaacccgcgcgtggccacgaacatatgcatcatgtgcgtacatatatccacgtatgttcggcctgcgtgcgagcagaagaaaggcacattcatgactgaagctgtggccaaagccaattacaagtggcgcgtcgtcgatatcgtcgtcgccgcaatcatcgccgtcgcatccggcgtcattttctggggctgggacattgtctgctccgccccgctggccctgtttgaaggcgtgacccccggtttcgagggtctgctcaacggattctggctgttcgctggcccgctcgctgcaatcattgtgcgcaagcccggtgccgcactgtttgccgaaaccctcgccgccttccttgagcttacgctgggcaaccagtggggcgtcggcggctcgctgatcgtcggcatcatccagggtctgggtgccgaaattgccttcgccgtcttcgcttggaagaagtggaacatcggcaccaccatcctgtccggtgcgctcgccggcgtgggctgctgggcctactactgggccaccaacccgggctggaacggcctgcgcgtcacttggtatctggtgggctccatcatctccggcgtcgtgatcgccggcgtggtggtctggtacttgtctcgtgcgctcgccgtcaccggtgctctggagcgttttgaatccggccgcagcaaggcgcgcgtctgatgcagattaatccggctgcggtagaggccagcggctggggatggcggcacgccacgcgtaaggacttcgcgttgcgtgccgtcgatttcaccatccggccaggtgaacgtgtgttgctgctcggtgcttcgggcgcgggcaaaagcacgatgatggccggtctcgcaggcgtacttggcggcgatgaggaaggcgagcaggagggctcgctcaccatcgatggcgtcgatgcgcgcgaggcgcgaggtcgcgtgggactggtgcttcaggacccggactcgcagatcattcttgaacgactgggcgatgacgcggccttcggctgcgaaaacctcaacgtgccgcgcgaggagatttggcagcgagtgcgcgaatcattggatatggtgggactcggcggactcgaactggatcggtccacccgccatctgtccggcggtcagcgtcaacgtctcgcgttggccggcgtgctggctatgaagcccggtctgctgttgttggacgaaccgaccgccaacctcgatcccgaaggcgtggtcgaagtgcatgacgcggtcaaaaaggtcatcgaggccaccggacagaccatggttgtggtcgaacatcatatcgatgtatggctcgatctggtcgatcgcgtgattgtgctcggccgacccgatgcaagttcgcccacgggtgcggtcattgccgacggcaagccggacgaggtgttcgccgagatgggcgacgtgttggccgccggtggcgcgtgggtgccgggccgtgcgattcccgattactcaccgaagcaggagtctgcgcacgatgcgccggtgctcagcaccgagaacttaagctttggccgtggggccgctcttggcgttggtatcaatctggatttttatcccggcgaagtaacggctctgatgggtccgaacggcgcgggcaaatcgaccttggccttgaccttggccgggctactcaagcctatcgccggcaaggtgctcatcgccgacaacctcaagcccgcgcatgccgggcgtgagccgatcgactggaaaagcaaggaactgctgggccgtatcggcatggtgttccaggagcccgaacaccagttcgctgccaactttgtgcgtgacgaggtatccatcggccccaagtcgatggggcagagccaagacgaggcttatcagaccgccgaccgcatgcttgagcagatgaatctcacgcgcttcgccaaagccaacccgtacaccttgtctggcggggagaagcggcgactgtccgtggcctccatgctggccgccgcacccaaagtgttggtgatggacgagccgacattcggacaggatttcagtacgtggaatgaaatggtcaagctgatcgccgccatccgcgaccaaggctcgtgcgtgatcatggtgacgcacgatgaggcgctggtggatgcgctgggcgcacgacgtgtgatgttcgaggaggcgaaggcatgagtgacgtggtaaccgtcagcccgcaggaaacgcgcgtggagccggtcaaagcctcatcgccctcatggttcatcgcgcgcatcaacgcggtcagtcgcatcatcggtgcgctgttgctgtgcattccgatgttcatcagtctggatgcggtatccgcatccacggcgctcggcatcgaattcgtgctgctgtggattggtggcgtggctccgtggaccgtatgccgtaagacctggccggtatggatcgccgccgccggcagttttatctccgtgttcctctacggccgcacctcgggcgagatcctgtggcagggtggctggattgtgatcagcgaggggtccatcaatctggccatcgccacggctatcagggtggcggcccttgccgtacccggcgtgattctggccttgggcctcgatcccactgatttggcggacggtctggttgagattctgcacttctcaccgcgattcgtatacggcggattggccggattgcgcatgtttacgctgctgcaggaagattggcgcgcactcggcttgtcccagcgttcgcgcggccttggtgacggtaacgccatcgcccgtgctctctcccaagcgttcggactgctggtgctctccatccggcgtgccaccaaacttgccaccgccatggaagcgcgcggcttcggctccggcgccccacgttcccaagcccgcatctcgcgtctgaagcctatcgactggatcttctacgtcatctgtctggccgtcccgctggcctccataggcgtagccgtcggcaccgggaattggcacttcgcctttcagggggtctgaaaggcggcaggctggcacagtgcctttcagggtgtctgaaaggcgacagattagcacagtgcctttcaaggtgtctgaacgccttatgatgcccccgctggcgggggctgtcggcgtagccgactggggtggttccagcctcgaccaccctcagtctcgcgactgacgtaatgacccggcagtagggtagtggctatgcccatcaacgcccagattcttgataatccgaaatccgaccgcgtgcgccgcatcgccgatctgacccgcgccaaaggccgcgaacgttcgggccgttttcttatcgaaggcccgcaatccgtgcgcgaggccgtcacttggcggccggacgtggtgcaggacctgtatgtagaggtttcgcaggcgctggaacatccgcgtatcatctcctccacgttggagaagatcgtcgaaacctcgcaggatgccacgatttatgtgcactactgcaccggcgacgtgatgcgccgcatcagtccggacgcccaaggcatcgcggccgtcggcaatgccgagtccatgcacgccggagccgatgacgtcgaacttggcaagaacggtcgggccccgcagattgccgccttctggcaggtgcgcgacccgggcaacgccggcaccgtgatccgtgcggccgatgcggccggctgcgacgccgtaatcttcgtggacgactgcgtggacgtgctgaaccccaaggtcatccgctccaccgcaggctccctgttccatctgccggtactcgccatgagcaccgacgaattcttcatctggacaggcgaccataatatggacgtctgggccgccgacgtatacggcaccgaagaacgcaagccggaaagcctgcccgcagtactggcggacaaggcggcggtcgaggctccgaaagccgtgctgttcggcaatgaggcgcgtggcttggaaccggacatcctcacgcgctgcggccgcatcgtctccatcccgctttatggcaaggccgaatcgctgaacctcggcacctcggccgcggtgatgctgatgtcgctgtctatgtcgggtcatgttgaaagaatgtgaaaccggtaaaaacgctgtgaaacgctgagaaaacatcagacgaaagggttctcgtggcagaacaaatggtgttcgacgccgaccaggtgaccgctgaggttgccgagggcatcgagaaaatccagaacgcctccaacctggaggagctcaaggccatcaagacaacgtacgcaggtgccgattcggcgatgaccaaggccagcaaggccattggctccctgcccgccgaccagaagaaggaagccggcaagctcatgggcaagctgcgcgccgacttcggccgcgcctatggtcccaaggaggtcgagctcaaggaagccgccgagaaggccgcgcttgccgccgaaaccgtggatatgacgctgccggtgagccgtaagcctctgggcgcccgtcacccgctgcctaagctgatggaggacgtcgaggacttcttcatctccatgggctggcagatctcctccggcccggaaatcgaagccgaatggtacaacttcgactccctgaatttcggcccggaccatccggcccgccagatgcaggacaccttctacgtcaagggcaatcaagccaaggacgccgccggtttcgtcggctccaacatggtggtgcgtacgcagacctcctccgatcaggtccgtgccctcctgacccgtggagtgccgctgtacatcgcgtccccgggccgcgtgttccgcaccgatgagctggacgccacccatactccggtgttccaccagtgcgaagccctcgccgtcgacaagcacctgaccatggccgacctgaagggcgtgctggacaagctcgccgtcgccatgttcggccctgaagccaagacgcgcctgcgcccgagctacttcccgttcactgagccgagcgccgaactcgacctgtggttccccgacaagaagggcggccccggctggctcgagtggggcggctgcggcatggtgaacccgaacgtgctgaagtccgccggcatcgacccggacgtctacaccggtttcgccttcggcgtcggcatggagcgcacgctcctgctgcgcagcgacatcaacgacatgcacgacctggtcgaaggtgacgtgcgtttcgccgaacagtttgtgatgggggagtgattcagccatgcctatgatcgatatcgattggctcaaggaccatgtcgaggttcccgaaggcctgacctacgaacagctcgccaaggaccttgtcaaggtgggtcttgaggaagaggagattcactcctctcaggtgaccggcccgattgtggtcggctacgtggtcgacgccacccccgaaccgcagaagaacggcaagaccatcaactggtgccacgtggactgcggcgacgaatggaacgagaccgacgaagacggcaacaaggtgccgcgcggcatcatctgcggcgcgcccaacatgaaggccggcgaaaaggtcgtcgtcaccctgcccggtgccgtgctgcccggcgacttcaagatcgaaccgcgcaagacctacggccacatctccaacggcatgtgtgcctccgaacgtgagctgggtctgggcgacaaccacaatggcatcatcctgctgcgtcagtatggcttctccgaggctgaatacgaggctctgaagcctggtcaggacgccatgcacctgctgcacctcgaccagcctctgcttgagatcaacatcaccccggaccgtggctacacgctgtcctaccgtggcgtggcccgcgaataccaccactccaccggtgccgcctacaccgatccggccgtggcactcaacgagaaggccccggaacctgctgactaccagcccggcaccccggtggacatcgatgttgaaatcgacgataacaatccgattcacggcgtgcccggttgcgaccgctactacgcgcgtatcgtcaaggacttcaatcccaacgcccacacgcccaactggatgcgccgccgcctgattcgcgccggcatgcgctccatctccttggccgtggacgtgaccaactacgtgatgcttgacctcggccagccgatgcacgcctacgacctcgacaagctcgaaggcccgattgtcgtgcgccgcgccaacgagggtgagaaactcaccactctggacggcaaggaacatgacctgagcgtcgaagatctgcttatcaccgattcgccgaacggcgaacgcggctcgcgcatcctcggccttgccggtgtgatgggcggcctgtatggcgaagtgaccgccgacaccaagaacattcttctggaggccgcgcacttcgatcaggtgaccatcgcccgttcggcccgtcgccacaagattccatccgaggcctcccgccgcttcgaacgtggcgtcgacaccgcgctgcagcctgccgccacccagatggccgccgagctcatggccaagtacggcaacggcgagcccagcgaacacccgaacgacgtgaacaacacgccgcgcgccaaggccatccacttcaaggcctccgaagtggcccgcgtagccggcctcgacgtggacatcaaccgcatctccgacatcctgaccgacattggctgcacggtggccggtggcggcaacggtgagttcgccgtaaccgcgccgagctggcgtccggacttgaacgagccgtgcgacctggtcgaggagatcgcccgactggtcggctacgaccagattccgatcaccgtgccgccggcaccggtcgagggtctggtgggcctgaccccggaccagcagcgtcgccgtcgcgtggcggacgagctcgccgagttcggcatggtcgaatcgctgagctacccgttcgtgggtgacgacgattacaaggccttcggcttcgacccggaagccaccaagaaggtcagcgtcgagatcgccaacccgctctacggcgaccgtccgtacctgcgtcgcgagattctgccgaccctggccaccaccgtgcagcgcaacatccgccgcggcatcgaaaacgtgtccctgtacgagctcggccacgtctacctgtgggatccgaacgcgcccgccatcccggcactgcccggcggcgtgcgccccaccgacgaacagctcgccgcgcttgacgccggtctgcccgaacagcccgaccatgtggccggcatcctgaccggtctggccgaggacgacggctggatgggcggcaagcgcccggtcgactggtccgacgccgtcgaggccgtgcgccgcatcgccggccgtatcggtgccgcaatcgaactcgaccagcccgccgccgacgatgtgcccgtccaatggcaccccggccgcgccgcccgcgtcatggtgggcgacgtcttcaccggctgggttggtgaactgcacccgcgcgtcaacgaggcgctcggcttcccggcccattccgcggccttcgagctgaacctcactgcgctgttcgccacgctgaccggcaagcccgtccaggccaagccgatctccacgttcccgccggtcaagcaggatttggccttcaccgtggacgagaccgtgaccgcaggccagcttgagaacgtgattcgcaaggccgccggcgcgaacctcgaatccatcgaactgttcgacgtgttcaccggcgaacaggtgggcgagggcaagaagtccctggcctatgcggtggtgttccgttcgccgagcaagacgctgtccgccgaagacagcgacgccatccgcaaggccatcgtggctgaggccgccgaaatcggcgcccagctgcgcgcctgacccaaccaatcatccgaatcgaggagcgccatgagccaaccggagcaggacaagccgaaatacgggcagtaccagcagcctgaatatggtgctatgtctggccaatacgggccgaattacaacccgtatatttatggcgctcccgagccggatactaagaaggattccgccgcagccgctggcgacaacggtggcgcggcacaatctcagcaggctggccagccgtatggtcagcagccggcgtggcccggcaatcagcaggcgggcggctggccgtatgctcaaggcggccaacagtccggtccgggcgcatatccgggcgggtacccgggcatgcagggccagccgtatggtcaacagccgaacggtcagcctcaccagccgcattattaccacggcatcgacctgaacgatccaaaccagaacccgctctacgggcactgggattcgtatgcgatcatctcctttatcctcgccctgttcttcccggtgccagtgctctcggcactgatgggcgcggtggcaatgtggcgcacgcgtactttccatatgaagggcttcggtttggccgtggccgccgtggtaatcaacgtgctgtacaccatcgccgtcatctggatggccttcaatggctatgacgccatgggcctctaccaggaagccctccagcaactcaccggcggcaccggctcctcctccgactccatctccgcataagtagtgttcacataccaacacacccactgcataaatatgcaatagtctgcataatcgcgtatactcgtccgaagacacatcagtgaaaagagatgagtatggcgaaatatacagtggccgtggccggtgccacgggctatgccggcggtgaagcgctgcgcattctggctgcgcaccccgacttcgacatcacctgcgcggcaggccattcctcagtgggggagtcgatggccaagcacatgccgcatgttccccaactggccaatctggtcgttgaagataccacgcccgaagtgctgaacgggcatgacgttatcatcctcgcactgccgcacggtgcttcgggcaagctcgcctcgcagctcgatccgaatgccgtggttgtggatttgggcgccgaccatcgcctcgaagaacaggccgcttgggatgagttctacggcggcgatttctatgagcattggacctacggcatgcccgagctcatcaccggcaaagccgcggacggctcctacacccgccagcgtgcggcgcttcctggtaccaagcgcatcgcaggtcctggctgcaacgtcaccgccaccacgctggccctccagcccggcatcgccgaaggactggttgaatcgcaggatatcgtggccgatctggtcgtcggatactcgggtgccggcaagaatctcaagcgcaccaacctgcttgccgccgaggccctgcaatccgccctgccgtattcggtgggcggcaagcaccgccacattcccgaaatcctgcagaacttcgcccacgcggccggcaagagcgcggccgaagccagcgaattcacgctcggcttcacaccgattctcgcccccatgtcccgaggtatcctcgccaccgtgtccgcccgcatgacggacaaagccaaggcactgagcgatgaggagattcgcgccgtatggtccaaggcctatgaaggtcaggacttcatggtgctgctgcccgagggcacactgcccgccaccggcaacatcatcggctccaacgcagcccacctgcaggtcgtcaccgaccgcaaggccggccgcatctacgcttttgccgccatcgacaacctcaatcgtggtaccgccggacaagcggtccaatcactgaacatcgcactaggcctgccggaagacgcgggcctgaccaagatcggagtagcaccgtgagcgttacatttgcacaaggtttctccgccgccggcgtggcggctggtatttcatccgtcgaaggcaagaaggacttggccctcgtggtcaacaacggcccgctcgacgcggctgcaggcgtgttcacctcgaaccgtttctgtgccgccccggtgcagtggagccgtaaggtcgtcgccgacggtcacgtcaaggccgtgattctgaactccggcggtgccaacgcctgcaccggcgaggccggttacgcccagtccgtcgccaccgcggaaacggtcgccggtctcatcggcgccgaaccgaatgatgtggctgtctgctccaccggtctcatcggtgaactgctgccgttggacaacgtgctggctggtgccaagagtgcccatgaggctcttgccgccaccgccgaagccggtgccgacgcctcccacgccatcatgaccaccgacaccaagccgaagacggtcgaactgaccggctccaacggctggaagatcggcggcatggtcaagggctcgggcatgattgccccgcagctggccaccatgctgtgcgtcatcaccaccgatgcggttgtctccgccggtcagatgcaggccgcactcgctgtggctgccgaacattcgttcaaccgcatcgacgtggacggctgcatgtccaccaacgacacggtcctgctgctcgcctccggtgcctctggcgtcgaaccggacaaggacgaattcaacaagctggtgcgtgaggcctgcgcatccctgtcccgccagatcatcggcgacggcgaaggtgcctcccacgacatccgtatcaccgtcaccggtgccaccagcgaagacgcggcacttgcctgtggtcgtgccgtcgccgcctcgaacctgctcaagtgcgccatctccggcaacgatccgaactggggccgcatcgtcagctccctgggcactgtgccacctgaagtcgcgccttacgattcgaacaaggtgaccgtggacgtcaacggcgtgcgcatctgcgagaacggcggtgccggccgcgaccgtagcgaggtcgacatgaccccgcgcgaagtccacattgacatcgacctgaacaccggctcggacgccgaggccaccgtctggaccgacgatctcacccacgaatacgtccacatcaacgccgactacgaaagctgacaaacagcccagtgggctgtttgtagcagccggcagcgatagcgtcgccggcgtcgcagaaaagagaaaaattgtctacagaattgaagggacctgggttccatttcgacgtgcacaccgatttgcgcgccgatcagaaggcagaagtgcttattgaagcgctgccatggctggaggagttcgccggccagcgtatcgtcgtcaaatacggtggcaatgccatggtcgatgaccatctgaagcagtgtttcgccgaagacatggtctttctgcgtcaggtgggtctgcacccgattgtcgtgcacggcggcggcccgcagatttcccacatgctcaaggccctcggcatcaaatccgaattcaagggcggcctgagggtcaccacccccgaggccatggatgtggtgcgcatggttctgaccggcaaggtttcacgcgaactggtaggcctgatcaacgcgcacggcccgctggccgtaggtctgtccggtgaagacggcggcctgttctcggccatgcagcgcaggcccatcatcgatggcaagtccaccgatatcggcctggtcggcgacgtggtttccgtcgatgcttcggcagtcgaggatctggtggccgccggtcgtatcccggtcgtctcttccgtggctccgaacgaagaagatgccactgaagtgctcaacgtgaacgccgattccgctgccgccgctttggctgccgctgtgggcgcacacaagctcgttatcttgaccgatgtggatggtctgtacgccgattggccggacaagaattctctgattggccggatcggtgtggaaaccctgcgcgatatgctgccggacctggaatccggtatgcgacccaagatggaggcctgtgtcagggccatcgacggtggcgtgccccaagcccatatcatcgatgggcgcaagccgcattcgattttgaacgagatattcacctccgcaggcatcggtaccatggttatgcccgatgaaggactggaaatgaggagctcttatggctactgagcatgaggaaaaactaggtacggaagacagcaagtggctgggagagtactctcaggtccacatgaatgtgttcggtacgccgctgcgtgtcatggatcacggccaaggtgcccacatctgggatgttgacggtaacgaatacctcgatttcctggcaggcatcgccgtcaattccctcggatacgcccaccccaagtgggtcaaggcggttgccgatcaggctgccaaggtggctcatatcagcaactattttgcgtccgagccgcaaattgaattggcatcaaaactggtcaagctggctggtgcacctgaaggctccaaagtctacttcggcaactccggtgctgaaggcaatgaagctgccctcaagctcgccaagctgtatggccgcaccttgcctggtgccctgccttccatcggcggcaagcccgcacgtattctcgcaatgactcacggcttccatggccgtacgatgggtgcgctgtccgccacatggaaacccggtatccgcaagccgtatgatccgctggtgccgaacatcgaattcgtgcgcgccggcgacaaggttgccctgcacgacgcttttgcacagaccggtctcggtcgctatggcaagggtccggtggctgctgtgattctggaacttatccaaggcgaagccggcgtgcagccgttgggtgccgattacgtcaagttcgtgcgcgaactgtgcgatatcaaccacgcgctgctcattatcgatgaagtacagaccggtatcggacgtaccggcaagtggttcgcattccagcgtgacgatctgtccggcggcgtgacgccggatatggtgactttcgccaagggtgtggcaggcggattcccgatgggcggcatgatcgctttcggcgagaaacttgcggctctgttcactcctggttcccacggctccacctttgccggcaatccgctgggtgcggctgcgggactcgccactcttgacgtgattgaagacgagaatctggtggccaacgccgaagctcgcggcgaacagctgcgcgatggcattatggccaccggtaatccgctgttcgtttccgtacgcggccgtggtttgctggacgccgtcgagctcaagcatccctgctcccacgcggtgatgaactactgcctcgaacacgggctcatcgtcaacgcggtggctcccaatgcgctgcgtttcgcaccgccgctgattgtaaccgcacaagacgtggaccaggcacttgccgtcctcaaggatgtgcctacggacctgcccgacgactgatttctctctgtcactgccgacccaccgatccaaggagatcatcatgaccccagaacttcgccacatgctgcgtgacgacgacctcaaccatgaggaacagaagcaggtgctcgaacttgccatcaagttccaccacgaccgcttctacaagcagccgttcgccggtccgcaggccgtcgccgtactgttcgacaagccctccacccgcacccgttccagcttctccatcggcgttgccgagcttggcggctacccgctggtcatcgacaagtccggctcccagctgggccgtggcgagcccgtggccgataccgctcgtgtgatcgaccgcatggcttacggcgtggtgtggcgcaccttcggccaggaccgcgtcgaagaaatggccaagtactccacccatccggtggtcaacgccctgaccgatgacttccatccctgccagattctcgccgacttccagaccatcgccgagcaccgaggcggcgtcgacaacctgaagaaccagaccatcgcctacctcggtgatgcggccaacaacatggccaactcctacctgctcggcggtgccgtggccggcatggacgtgcgcgtggccggcccctacggctacctgccccgcccggacatcgtggccgacgccaagcgcatcgcggccgagaccggcggctccatcctggtcaccaccgatgccaaggaagcggtgaaggacgccgattgcgtgttcaccgacacctgggtctccatgggcgaggaagccgaatacgccatccgttccaagccgttctgggattaccaggtcaacaccgaacttatggcattggccaagccggatgcgctcttccagcactgtctgcccgcctaccgcggcaaggaagtcaccgctgaagtgatcgacggcccacagtccgtggtgtgggacgaggccgagaaccgtctgcacgcacagaaagcgttgctgacttggttgaccggcaaggcccgtggagacgaaagcctgctcgcatgagtgaaaccggtccgtccctgcagcgccctgccactagggcggcgcggctgagtgccatagaacaggcgctcgccacgcatatcatcacctcgcaatcacagctgtccaaaatccttatcgacgagggtattgcggtgactcaggcgaccctgagccgcgatcttgatgagatgcatgcggtgaagacccggctgaaggacggcacggtggcctacacggtgggtcgcagcgtcgttgcttcggaaggtgaggatgtaggggagcgcggtgaggcacagatgtctcgcgtgctgaacggactggtcacctcggtggccgccgccagaaatctggtcgtggtgcacacgccttccggtgccgcacaatacgtggcctcggtgattgacaagcagtcgatcgaaggcgtgctaggcaccatcgccggagacgacaccgtcatggtgatctgcaccaatgacgacaccgccgtcttccgctccgactggctactaagcctcgcctccaaataaccaacacgccgtgcataaatatacagtcttctgtatatacttgcatcagctcgtttttcagaccttgaacgaaagggaaccaatggcagataacaagcgcattgttctggcctactccggcggtcttgacacatccgtcgccatctcgtacctgaaggagcgcaccggcaaggacgtcgtggccgtgtccctcgacgtcggccagggcggcgaaagccttgagaccatcaagcagcgcgccctcgcctgcggagccgtcgaatcctacgtggtcgacgcccgtgacgagttcgccaacgaatattgcatgaaggccctcaaggccaacgccatgtacgaaggcgtctacccgctggtctccgccatctcccgtcctctgatctccaagcacctcgtgcgcgccgcccaccagttcggtgccgacaccatctcccacggttgcaccggcaagggtaacgaccaggttcgtttcgaggtctccattgcctccatcgacccgacgctgaaggccatcagcccgattcgcgacctgtccctgacccgcgacgtcgagattgcgttcgccaaggagcacaagctgccgatcacccagaccgagaagtccccgtactccatcgaccagaacgtgtggggccgcgccattgagaccggcttccttgaggatccgtggaacggcccgaccaaggactgctactcctacaccgacgacccggccttcccgccggtcgaagatgaagtcgtcatcgagttcaaggaaggcgtgccggtcaagatcgacggacgtgacgtcactccgttgcaggccatcgaagagatgaaccgccgcgccggagcccaaggcgtcggccgcatcgacctcatcgaggaccgcctggtcggcatcaagtcccgcgagctttacgaggccccgggtgccgtggccctgatcaccgcgcaccaggaactcgagaactgctgcctcgagcgcgaacagcaccgcatcaagcgcgacatcgacaagcgctggggcgagttggtctacgatgcgcagtggttctccccggcgactcagtcgctcaacgcgttcatcgaggacacccagaagtacgtgtccggtgagattcgcatggtcctgcacggcggtcgcgccgtcgtgaccggccgtcgttccgactcctcgctgtacgactacaagctcgccacctatgattccggcgataccttcgaccagaagtcctccaacggcttcatcgacatctacggcctgccgtcccgcgtggccgcagcgcgcgacgtcaagttcggcaacggcatcgaggtcccggagaacaccgtcgagtaattcttactcagtcgcccccgctgcgaggctgtcggcatagctgactgggagtggtctttgaaaggactgtcctcagtcacactccatgtgacagccctcgccagcgggggcaactgtatgtttgaacacattgctacgcttaaacacagctattttcacttttcaaggagccttcatgactgagaacaacgaacatctggccctgtggggtggtcgctttacgtctggtccgtcgccggaattggcccgactgtccaagtccacgcagttcgactggcgcttggccgacgacgacatcgccggttcccgcgcccacgcccgtgctctcggccgtgcgggacttctgaccgccgacgagctgcagcgcatggaggatgcgctcgacacgctccagcgccacgttgacgatggctccttcgcccccatcgaagacgatgaggacgaggccaccgccctcgaacgcggtctgattgacattgccggcgatgaactcggcggcaagctcagggccggccgttcccgcaacgaccagatcgcctgcctgattcgcatgtggttgcgccgtcactcccgcgtaatcgccggactcctgcttgacctcgtcaacgccctgatcgagcagagcgaaaaggccggccgcaccgtgatgccgggccgcacccacatgcagcacgcccagcccgtgctgctcgcgcaccagctcatggcccacgcttggccgctgattcgcgacgtgcagcgactgatcgactgggacaagcgcatcaacgcctctccgtacggctccggcgcactggccggcaacacgctcggcctcgacccggaggccgtggcgcgtgagctcggcttctcccgcgtgaccgacaactccatcgatggcaccgccgcacgtgatctcgtggccgaattcgcgttcgtggccgccatgaccggcgtggacatctcccgcctgtccgaggagatcatcatctggaacacccaggagttcgccttcgtcaagctcgacgacggctattccaccggctcctccatcatgccgcagaagaagaacccggatatcgccgagctcgcccgcggcaagtccggccgactcatcggcgatctgaccggcctactggccaccctgaagggcctgcccaccgcctacgctcgcgatctgcaggaagacaaggaggccgtgttcgaccaggtcgatacgctcgaagtgctgctgcccgccttcaccggcatggtcaggaccatgcacttcgacggcgaccgcctggaagaggaagctccgaccggcttcgcgctggccaccgacatcgccgaatggctcgtcaagaacggtgtgccgttccgccatgcgcacgagctctctggtgcctgcgtcaagctcgccgaaggccgcggccaggaactgtgggatctgactgacaatgacttcatcgagaccttcgccgcgttcctgccggccgacaaggctccgggagtacgcgaagtgctctccagccacggttcggtcgactcccgcaacggcaagggcggcaccgcttacggtcgcgtgcgcgagcagatcgccgacgccaaggccgaggtcgaagaactcaagctcttccccgcatccacgtcggatggctccgcctacaaagcccccggcacgttctagtcccaatgaagctccctctgatgagggagcttcattttgctgttgtcactgcaacggcatacactgagaaaccgtaacgaacgggagccgtgaggctgagaggaagtcgccagacttcgaccggggaacttgacgcgggtcatgccgccgtaaggaatcgttgtcgcagatttgccgggttctccgatacagctttcattccgtttgcataattcagccgtgagacggtcgtgatggagccaatacatcacagcggtcgaacggtcgcatgattgggttcatgaatgggcgcaccacttaaggtacggttcgtttcgtgcacccttttttactatctgaaaggatattatgcaggtcaacggagagcaggtcacgctcgagacgccggtcagcgtcgccgattatctcgaagcgcacggattccgcgccgagcgtgtggccatcgaactcaatggtgagattatcccgcgtgataagcgtgccgacgccatgctcgacgaccagtgcgtcatggaaattgtgcagtttgtacagggtggatgaaaggaaaagctatgagcaatattaatccggttactgaagcatctgttgaggcgactccgctgccgccgcagcccgccgtcaccaatccggtcggcaccgccgcgccgattctcccggtggaagacaagccgctgaacctgggcggtcacgagttccagtcgcgattcattctgggctccggccgctacgacctgaacctcatcaaggccacggtcgaacatgcaggcacgcaaatcgtcaccatggcactgcgccgcgcgcagaccaccgagaacagcgtgctcgactacattcccgaaggcattacgctgctgcccaacacctccggtgcgcgcaacgccgaggaagccgtgcgtatcgcccgactggcacgcgaagtgtgccacaccgacttcgtcaaggtcgaaatcgaacacgagaccaagtacctcttgccggacaacgccgaaaccatccgagccaccgaaatgttggccaaggaaggcttcgtggtcatgccctacatgttcccggacccgattgcggcccgtcagctggaggaggccggtgccgctgccgttatgccgcttggttcgttgatcggctccaatatgggcctgcgcatgcgtgacttcatcgaaatcatcatcgccaacgcgcatgtgccggtcatcatcgacgctggtatcggccgtccgagccaggcctgcgatgcgatggagatgggtgcggatgcggtgatggcgtacacggccgttgcctctgctggcaatatcccgctgatggctgaggcgttcaagcacgccatcgatgctggtcgtgcggcgtatttgtctggccttggcaaggtgaccgagggacaggctgtgccgtccagcccgactacagggtatttgcactgacacttttattagctcccctctctgaggggagctggccgcgtagcggactgaggggagctggaaacatggagaaaacatggcattgactgatgaacaggtggagcggtacgcgcgccatctgattttgaagggtgtgggcgtcaaagggcaaaagcggttgctggcctccagcgtgctcatcatcggagcgggcggtcttggttctccggccgccctgtatctggcggcggccggcgtcggccatatcggactggtggacggcgatgtggtggatatgagcaatctgcaacgccaaatcatccataccactgcacgtgtcggagcgcccaaagtggaatccgcagccacagccatccgcgcgctcaacccggatgtgacggttgatacctactacgagctcgtcgacgcgagcaacatcgccggcctcatcgaaccgtacgatctggtgatcgatgccaccgacaacttcgccgcaaaattcctcatcaatgacgcctgcgtgctggccggcaagccgtatatccatgccggcgtggtcggattcgccggtcaggtgatgaccgtcattcccggcgaaggcccctgctaccgctgcatcttccgcgacctgcccgccgccggtgagattccgacctgcaaggaagccggcgtactgggcgcggtggtcggcgtgatcggcagtctggaggcgactgaggccgtcaagctgattgccggcgtgggggagccgctcgtggctcgcatgctcactgtggatgccctgaccatgaatattcgacgggtcccactgccaaagcatgtgccggattgcccggtgtgcggtgagcagccgaccattactgctattgatccggccaactatattcagccggcctgcgcgatttagagctatgtggtgcccctccttgaggggtgccaagatcagaacgagaggggaagaacatgcctattgctttgcataatgcggtcgatgacgatgagagcagtgaagcatcgtaccgccgcatcacgccggcggaatttgccaagctcgacccgaatacggtcacgctgctcgacttgagggaaccagccgacttcgccgcccacccggtcgaaggtgccatcaatgcaccactcgaccctctggcccatgtgctcaaaaccgtgcccacagatcgaactgtcgtagtctattgtgctcaaggatggtggagcgaggaagtagctgaaatccttgccgatcgcggctacgatgtagcaagcctcgatggcggttttcaaggttatctcgactatcttgaaacccaccacgattaacggttcccgttgtcgttcttttggatgagtgtgcacggacatatttgtgccctacaatcggtcacggtattactcgatggattcttgaatatcgccgggtaatcgtaattcacaacaggggattgcactgaaccaacccaaaacgggaaggaccgaaaatcgtgggacatctgctcacccgaacgcagattcaacgcctggtcgccaagcacggccgtgaggtcatcgagcatcgccacatgcagatcgaacgctgctgctaccagcacggcaatgtcaccacgttcgaacattccgtgcgtgtcgcctgcctggctgtgtggatggccgaccgcgcacacctgtggtaccgcgtcgacctcaaatccctgattcgcgcggccctcctgcacgattacttcctgtacgactggcacgactgggataacggcgaacaccagtggcatggcttcacccatggccacgccgccctggtcaatgccctgaaggacttcaagctcaacgatatcgaacgcaacagcatcgagaaccacatgttcccgatgaccccggtgccgccgcgctatatcgaaggctatctggtcaccttggcggacaaatgctccgccaccgccgagaccttctcgttcgaccggttcaacaagcgcgcgttgcccgccgcgaagccttacgccgagatcgaagcccgtcgatgatcatcacactcgaacattatttcctctggtttttgttctacagtttcgtcggctggatgtacgagtccattctcgtctcctgccaacagcaccgcttggtcaaccgagggttcctcaacggcccgctgtgcccgatctacggcaccggcgcgatactcggcgtcgccattctcggcaacgtacataacccgatcatcatcttcctgatttcgatggtgggcgccacgatactcgaatacacaacctcgtgggtcatggagcagctgttccacgcccgctggtgggattactcgaacttccgcttcaacctccaaggccgtgtctgcctgctgggcgcgttgattttcggcctcggcggcgtgggcgtggtacttggttcgcagccatatgtcgagcgggtcacggatatgattccgctgccgatgctgcatacgctggtcacggtactggccctgatcaccatcatcgacttggcggtcacggttgcgggcatgctcgaattcgagcaggtgctcgattccgtctctcaggtggtgcaggatgtggcggcacgcgccggtggcacgtggcagtggggctccagtgcggtatccgacaggatgcgtgagctttcgcaggatacggttgagcgtctgcgctgggccgtcaatggcgtcatcaacgcacagcagaagcgtatgctcaagtccttcccgaagttccaggtgccggatcgtcaggacatcatcgactctttgcgcgaacttatgggcccgcgccgctagaataaggcgttttactgaatcgcgcggctcggctggtgttcggcactgtcgccatgttctgcgaaacttgactgtgcccaattgggcagtcttattcacaattcgatagggagaagcgacaagctatggctcacgtcaccgacttcaaggaagcgggtttcaacaccctgcttgaggaactggaatggcgcgggttgatttcccagtccacggaccgggatcgactcgcagaagcactgaacggcgagcccatcacctattattgtggcttcgatcccaccgctgcatcgttgcatatcggcaacctcgtgcagctcatcaacatgcgtcacctgcagcttgcgggccatcatccgatcgctttggtcggtggcgccaccggactcatcggcgacccgcgccagtccggcgaacgtacgcttaacccgaaggatgtggtggccggctgggccgatcgcctgaagaatcagatcggtggcattctggacaccgaaagtgcgaacgccgtacgtttcgtgtccaattacgattggaccgcctcgatgaccgtcatcgacttcctgcgtgacgtcggcaagaacttccgtctgggcaccatgctcgccaaggacacggtcgcccgccgcctgaactctgaggaaggcatctccttcaccgagttcagctaccaggtgctgcagggcaacgacttcctccacctgtttgacgaataccactgcacgctggaactcggcggctccgaccagtggggcaacctcacctccggcctggacctgatccacaaggtgcgcggtgtggacgtcaacgtgttcaccagcccgattatcaccgatgcttccggcaagaagttcggcaagtccgagggcaacgccgtctggctcgacgccacgatgctcagcccgtacaagttctaccagttctggatcaaccgcccggacgtggagatggaaagcctgctgaaggcgttcaccttcctgcccaaggccgaaatcgaacgactggtcgaggaatccaagaccaaccccggcaagcgcgaggcccagaagaccctcgcctgggaggtcaccagcttcgtgcatggcgaggccgctacccaggctgccatcgatgcttccggtgcgctgttcggacgcggtggcaacctcgaagacatcgatgaggaaacgctggaatccgtgctcgacggtttcaaggtggtcgacgagaacggcgagcacgtcttccccgtctccaagcccggcgatcgcgtaatcgacgccgcccaggctgccggactgttcaagtccgcttccgaggcacgccgcgccatcaagtccggtggcgtgtatctcaacaacaaccgtatcgaggatgaggagcaggtgctggccgaagccgatttcctggcaggccgcttcgcgctcatccgtcgtggcaagaaggcgctcggcgccgtggaaaaccgttaatcaacaacgaattaaggaaaacaagtaatggcagaaggtaacgagcgttccggcaagtcctacggcggcggccataaggggtatggcgatcgccgaccgggcaaccgcggcggcaagggtttcaagccgcgcggcaagggcggtttcaagccgcgtcatgacggtgagggtttcaagccgcgtcgccgtgaggatggcgagggctacgcgccgcgccgtgacggtgatggcgagggccacggcggctaccgcaagtcgtacggcaagtccggcggcttccacaagggcggccgctccggcttcggcggcaagggcggttaccgcggcaatggtccgcgccgtgacggcgaaggcttcaagccgcgccgcgaaggcggctaccgttcccacgaaggtgagaacggcgagaatccgcgctaccagcaccgtgataacgatcgtcgtgatttccgccgtgatgaccgccgtgacttccgccgcgatggtgagcgtcgcagcttccgccgcaacgatgaccgccgagatttccatagggacgaccgtcgcgatggggaccgtcgtgatttccgtcgtgataatgaccgtcgtgacttccgtcgcgatgaccgcagggataacgatcgccgtgatttccgccgcgatggtgagcgtcgcaacttccgtcgcgacgacgatcgccgtgatggcgaccgccgcaacttccgcagggacgaccgccgcgatgatcgtcgtgacgatcgccgcgacaacaaccgtcgtgacggcgaattccgcgagttttcgcaggaagagaagcgccagtaccgtgaggagaagcgttctgaatacatgaggcgtccgcgccgtaactccgacggcacgatgagcttcccctcgcagaacccgtacaccgaccgtcgtcccgacgagcccaagatgcccaagggcatggaatggtcgatgctgtccaaggatgagcgcgaacgtctgcgcggcctgtccaaggagcacgcggagaacattggtctgcacatcctcgccgctttcgcgctggaggagagcgatcccgaacttgccttggagcacgccaagtgggtggcccgtcaggcctcccgcatcgacttcgcccgcgagacgctcgcgttcgtggcctaccgtcagggcgactacaagctggccctgcgtgagttccgcaccgcctaccgtatgaacggcttcctcgactacctgccgttcatcgctgactgcgagcgtggcgtcggagagccgaagaaggccgtggaactggcgctgtccgatgagggcaagcagctgcatggcgctcccaaggtcgagatgttcctggtgtacgccggtgcccttggcgatttggagatgtgggacaaggccattgaagtggttcacaccgtcggccgttcccagggtctgccgggtgagtaccgcatgcgtgccgtgcaggccgagcagtacttccttgaagaggccggccgcagcaaggaagccgagcagctcaacgacctgctggaccgtcttgaggaccagtatgccgacgaggagattgacgaaaacagcgacgacgtggtgatcgatcacgatctcgaagacatcaccgacgactccgacgtgctcgaaaagctcggcatcgatccggatgaggcgcagtacgccccggatccggagcaggaatacggcgatgaggatgacgaggctgaagacggcgatgccgagtctgatgaggccgacgagaccgagaccgattccgccaatgacgccgaggctgacgattccgccgaatccgccgactccgactccaccaaacccgaaaccgaaaccgaaaccgaggagtgagcggcgtaatgacccgtttcctcaaaggcaccgatcgcccgctcgccgaggcctatcagcttgcgctgctggacctcgacggcgtggtgtatcgcggcaagaatccggtcgaatacgcggccgattccattcgtgcggccgaagccgccggcatgaccatcgaatacaccacgaacaactcctcgcgcttccagcacgtggtggccgaccagctcaagggcttcagcttggacgtggagccgtggcaggtcatcacctcttcggtggtggccgcccgtatggtggccaaggcgttgcccgccggcgcgcgcgtacaggtattgggcgccgagcatttgcgcgatgaggtcacccgcaacggcctgaccatcgtggacggtcctcaggagcgcccgcaggccgtcattcagggctggtatccggatatgacttggcagatgatggccgatgccgcgttcgcggtcgaggccggagccacgtatttcgtgaccaaccgcgacctaacgattcctcgtgaactgggcatcgcccccggttgcggatcgatgattcgcgccgtgatcacggccaccggcgtcgaaccggtcgcctccgctggcaagccggaagcgtacatgtacgatgaggcccgcgaactgaacgccgccgaaggccacgatttggtgcccaaggaggcgtccatcgccattggcgaccgcctcgacaccgatatcgaggccggtaaccgcggcgactacgattcgctggcggtgctgaccggtgtcaccaacccgaccgaactgatgctggctccgtcacacctgaggcccacattcatcgcccctgatctgcgtgaactcggcgaagcccaaccggagccggtccgcgatgagagcggtacttgggaatgccgcaaggctagcgcttggtttgaaaacggccaggtacacgtcagcgaccccaccagtatggacggcctgcgcgccgccgtatgcgccgcatgggaagccgccgaccaaggcgcacagcttagcgaggccacggtaccggtgttcgccatcgaggcatagtcctatgcctacggatagcgaacatgcgccggtcaccgagcgataccccgaacttgcggatatcgatgaacaagacaacgaccgcaagcttgagacctatcgcaacgtgctggaatccttacaacacgagcttgataacagccgcagctagcagaggtgattcattctcccgccagcggaagatgacgtgaagtgctggatggtggctccatgccgagccaccccgttggtggatggtgggccgaaaggaagatatatgaccgagcagcatatcgatcccgcgactccacttgaccgacttgacatgatgctcgtggcttcgggactggtcgaatcgcgggccaaagcgcagcgactcatcaaggccgggcatgtgcgcgtggacggcgagaccatcaccaagccatcgttcatggtcaaagccgggcacagcgaactcgccgtggataagggcgacgactacgtctcccgaggcgcttacaaactcttgggcgcgttcgaaacctttgccggcaatggccttaccgggccggaaggcttggaatgtctggatatcggtgcctccaccggtggcttcaccgacgtactgttgcgcgggggagcggccaaagtcgtagcgctcgacgttgggcacggccagctcgacccgcgcatcgccaatgacgagcacgtcatcgaaatgagcggcgtcaacattcgcgaagtagaggccgacgacctgccttaccggccggcgatgatcgtctccgatgtctcctttatttccctgacctatgtgattccggtaatcgcgcgcatcgcggctcccggtgcgcagattgtgttactggtcaaaccgcagttcgaggtcggccgggcaggactcggcaaaaacggcatcgttgaagatccggcattgcgggagcgggcattacacgacgtggtcgcctgtgctgaacagcacggacttgacgtggtggccactgccgatagtcccatcatcggcacccacggtaatgaggaatacctgctttacgctgtcttgagatgaatgcgttggcagtctccgttcaccagcagcacgctggaggtacggtcgacgcctagtgcggtggcacacgtggcgctttccaccgcactgccgttgcgtagcatggcggagtccgctgtcaaagtccggcattgcagatggttggcttcaaccgtgacggctgtgatatggcgaaccgtgctgccatcctcatacccatccatatcaaaacgagaaaacatcgtactgcggagtggatgaacttccagagccctgctgttgacgtcatgacccttcaacacgccgttcaagcggactgtctgaccgctaatatgacgggtgcctagggagccattgacggacagatttccggaacaaacgatatcgccgttgcatcgtagtttgccggtaaaggttatttcatcgcaaataatgtcgccgccgacttcgatgtcgccgctgccgctgatgctggatacgcgaatatcaccatcacaccgcacaatgccacttttgatgaccagtttgtccccttctataactgaggcctcgagggtgctggtcacaatcatggtgtgaaaatgcgcgccatcggcaagacgggaacgttggtccactcctatggtgccgtagactcctttgcctatcagcgtgcaattctgcgtatgcttgcccatgatgataaaactccccttattaatatggacgtacagctttatggcttattgccacaataatgagcgcatccatgttgagggggttatatcggtcacgatgtgagcagatagggggtataacgagcgcagttagggggctaaccttggatgaagtggtcgatctgatcctgcttgcccatgaggatgagttcgtcgttgcgatgcatgaccagttccttggaaccgtactggaactccttgcctggggccttgaggcccaccacggtcacgccgtatttgccgtgcacctgcacgtcctcgatgctgcggcctaccgcgtacaggggcgtgtggatcttgacgacggtgtacggcccgtcgatttcgatgtaatccagataattgccggccaccagatgacccacgcgcttgccggcatcggtctccgcattgatgatgtgacgggcgccgatgcgctgcagaatgcgcgcatgctcttgggacacggacttggcccacaggtcggaaacgccggcgtccagcaggttgccggtgatgatcaccgaagcctcgatgctgtcgccgatggccacgacggccgtgtcgaactgggaggcgtcgatctgctcgatggccagcacatcggtcatgtcggcctgaatggtgggcagatgcgcggaccaacgggccacaagctccggattcttgtccactgcgagcacatcctgacccatctggtcgagggtggcggccacggacccgccgaaacggcccagtccgatgaccagcacgcttttgttgccgctcggttttgctgccatgatgatggtcctctctatgtcagattgctgggtgccgattgaatggccgatcagccaacgataatgttttcctgcggataacgaataggttcgggagccatcggtcggctgatggagtaggcgatggtcaacgggccaagtcgtccgacaatcatctcggcggacagaataaacaggctggccggattgccggcgcttgccacgcccaccgaataaccacccaacgagaaggccgagcaggcttcgaacacggcgtccacgaacgcgcagccggtggtgaacatcagcatcatcgcaccgaccataaccagcgcaaagcaggccgtggtcacggacacggcggtcatctgaatacggcgggggatacggcggcggaacacggtgacatcgcgatggccggtgaatgcggcgcggcaaatcaagagaatcaccgcgaacgtggtgacacggatgccgccagcggtggatgaggaacctgcgccgatgaacatgagtatgctcatgaacaccttggtctcattcgtgacttcgggcacccaggaaatatcgaaaccggcggagcggggcatgacggcggcgctcatcgcacggcgcatcttcatgccggggtcatctgcggggaacaggccggtattgctccactcgaccagcaggaaccaagccagtgaggtggccaccagcacagcggtggtcaccaaagtgagtttggtgtgcaatgtccaacgtttcgggctgagccgccggcgtgcgcactgcaccagattcagcaccacggggaagccgagcgttccgatgaatgcactgatgagaatcggcagccccacgccccaacggttcacatgcagaccagtggcatccggcgtgaaaccggtgttgttataggccgacaccgcgtagaacagcgcctgccacaaggtacgccccatattgccatggttcacgcggaacaggtcgggcagcagcagcacgaaggtcagcacctcggcgatgatggaggtgcccagcaccacggtgagcacgcctttgacctcggaaagcttcgtggtgcccagctcgttcgcggtgagcatacgctgggagaccttgagtctgcgggaagcgccaagagccaccatcgaggcgaaggtcatgacgcccagaccgccgaactggatggagagcaggacgacgacctggccgaacatcgaccagtattcgccggtgttcaccaccggaatgccgcaggtggacagggccgagacggcggtgaagaacgcgatcgggaaattggtgaagatgatgtccgatgtggagatcggcagcagcagcaaaccggtgacgatgatgatcagtgcgccgaaatacaccatggacagacggcccgggtgcctgagcagacggtcggtgatgctgatacgtcgaatgcgcttggcggttttatcgcttttgtctcggctcagtacatcggctgaataccaccatgacagtcccttcgaggcctcctcattggcggaggattcgtcgaagtcattggccatgggtcctcaagctcctcaactgatactgctgtacggtcatacggcatgccatcgcgctgcgcacggcacgcgtacggtgattgcgcggctgtacgccattgtatgccgaagccttacgataatcgactctgtggaacgttgccggcgacgcgccacgaagcagcatttttcgaacacctgtacgactgatgacggtgtctgcggttagaataatgagcagtgcgaccgaatcgacaggaggatgccatggccaagcgcaacgcggtggtggtgacgcataccaggctcaggcagaccggaaccgtagtgggcgaggcggtgagccagctgcgagtggccggtttcgaagtcaccatcatcgacaacaccgaggcccccgatttcggcgtgcagccgccgtgcgtatcggacgacaccgaaatcgtcgtggtcctgggcggcgacggcacgatactgcgcgccgccgaactcgtccactgcacccaggtgccgattctcggcgtgaacatggggcatgtcggcttcctggccgaattcgaaagcttccagatcgacgaggcgatccgccggatcgccacccacgactattcgatcgacgaacgcatgatcgcccatgtggacgtctggctgcccggcgccaccaagcccattgaggattgggcgctgaacgacatcacactggaacgcgccgaccggggcaagatggtcgaactgtccatccgcgtggacgatgtggagatgaactcgttcggcgcggacggcgtcatcgtctccacgcccaccggttccaccgcctacgccttctccgcgggcggtccggtcatgtggccgaacgtcaaggccctgcagttgattccgttggccgcgcacgccctgttcgccaggccgctgatcatcggctccggctcgaccttcaccatcgatattctggacgattccatgtccgaaggctggatttgctgcgatggacgccgtcagcgcgccctgccgcagggtacgcgcgtcatggtgcgcgaatcgcgcgataccttgcgcctcgcccgactctccggcgtgccgttcaccaaccgtctggtctccaagttcgatctgcccgtggtcggttggcgcgagcacgcgcgcaacgaggcctcgagccagtcgctgcatcacgggcacacgttcccggcggccgcgtatgcggctggcgttgccgttgccggtgacgccggcgtcgctggtaccgagcccgacaagccgggcgaacgtgacggcaaggcaggggcctgatgctcgaagaactcgatatccgcaatctggggccgattcgagaagccaccattgcgccggccgcaggcatgaccgccatcaccggtgagaccggcgccggcaaatccatgctgctctccgcgatccgactggtttccggtggggccgccgaatcctcgcgcgtctcgtccggggcggacgaggcttgggcccaggcgattttcgcgctctcggatgatgccgtcgcatctgaacattccggcgacaccaacgatgccggtgacgatgccggttctggcgatgccgacagtgggttcaccggtgctgccgcggccgtggccaaggcccatgacgcgggcgtcgaccccgaagacggcgaactgttcctttcccgcaccgtacgcgcttccggacgttcgcgggccgtgctcggcggcaagtccgtaccgcgttcggtgctgggggccatcgccggcgaactggttaccattcatggccagaccgatcagctgaaaatcgcggcctcctcacggcaacgcgagtttctggaccgggtggccggagacgaagccgaactggccgcctaccgcaaggcgtgggatgcgctggccgccatggatgagcggctggaacgcctgcgctcgcaggaatcctctgcccgccaacaggccgactacctgcgcgaatccatcgaccgcatcaaccgaaccgacccgcagccgggggaggatgaggagctgaaggcgcgccgcgaacgcatcgaaaacgcggccgacatcgcccaaggcgtgggttcggcgctgggcgcgctggatgcctcgcaggtggatgtggacgccgccgacggcgcttcggccgtggaactcatcaatcatgcggtgacctcgttgcgcgcgattcgcgtcggcggcacgttcgctgagcaggccgatcggcttgaatccatcaatgccgatttgggcgacgtggtgttcgccctgagccaggagctgggcgacgaaggcagcgtggaggatctggaccagatcaacggccgtatccacgagcttggcgacctcacccgtcggtggggccccaccttggccgacgtgctcgcttggcgggacaaggcggcgttcgatctggaggatctggatgcctcgccggaaaaggtcgccgaactcgaatccgaacggcagacgctgtacgatgcggccctcgccgccgccgacgtgctgagcgccgcgcgcgtggctgccgctgccgacttgggtgcgcgcgtcactgaagaactcggctcgctcgccatgctgggcgcctccttggaagtgcgcgtcacgccgcgagacaaggccgatgatccgctcggcccgtatggtcgcgacgatatcgcgttcctgtttacgccgttcgaggggtcgccgcagttgccgatgggcaaaagcgcttcgggcggtgaactgagccgactgatgctggccttggagctggtggccgccgacacgcgcggcggtgccgaccagaccttcatcttcgacgaggttgacgccggcgtgggtggcaaggccgcggtcgaactgggcaaacgtctggcacggctggcccgcagcgcgcaggtcatcgtcgtcacccacttggcgcaggtcgcctcgtgggcggacgcgcagttcgtggtcaccaaggagccgccggatgccgatgacgacgatttgggcgtggtcaccaccatcgccgaagtcagcggcgaaacccgcgtccatgaaatcgcccgcatgctctccggcagcgaatccgaagcctccctggaccacgcccgagaactcctatccgattctcggcttacgctcccgctggcgggagctggcgccgcaggcgactgagggtggttgaagaagatggagattagcaaatgaccaaggccgccatattcgacctcgatggcaccctcctagactccatgggagtctgggaccaagtcgacatcgacttcctgaacaagcgcggaatcgaagtgccgctcgactacatgaccaaagtttccgccatgcaattccgccagatcgccgaatacaccatcgcacgcttcggccttacagacacgcccgaagagctcatgcaggaatgggacgacatggccagcgtcgcctattctaccacggtcgaagccaaacccggcgcgcttgactatctgcgcgatctgaaagactccggtgccaaactgggtgtcgccacctcgctgcccccgcgtctgcgtgagccggcgctacgccacgtcggcatgttcgatttgttcaacgatatcgtctccgtcgatgacgcgaacgacgtcggcaaggaccagcccgacgtctacctgctcgccgccaagcgcctgggtgctgcaccggccgactgcacagtgttcgaagacctgttggtcggcatgaagtcggccaaatcagtcggcatgaaggtctgggccatgcacgacgactcctccgcctccgactggcccgaaatctgccacctagccgacggtgtcctcttcgacttccacgacgccccgcgcgtgctgtgataaaaaagttacgcccccgctggcggggctgtcggcggaacggcgttgttcggcataggtgcccctttccgaggccattgtaggcacggcccatgtttcgacactgtatgttggcgaggtgttcgttcaccgtttaactgttatgtaacacaccttgacagttaagcagaacagttatactgtgttgtataacagctaaacagctggggtgctagtcaatcacaaccgaaaggggcatagatgaaactgatcatctcatccgtgtccggtgagcccatctacgagcaaatcaaaacccaaatccgttcggcggtgctcggcggcgagctgaaggcgggcgaggccctgccttccctgagaaaactcgccaaggagttgcgcatctccgtactcaccgtcaccagggcgtacaacgaactggccgatgagggcgtggtgcagaacatccaaggcaaaggcactttcgtgatggacaagggcaacgaactgatgcaacgtcagctcgaaacccagattcgtgaaagcctggccgaggcaagccggggcgccaaagccgccggcattccgctggacgcattggaccgcatgctcgaagaggaataccgcaaggaataacctcaagaaaggaccatggccatgaccgccatatccgaatccgacgcgatggcgttgcaggtcaccgacgtcaccaaacactatgattccggcttcacgctggacgacgtgaccttcgatctgcccaagggctacatcatgggactgatcggcccgaacggcgccggcaaatccaccctcatcaaactcatcctcaacatgatccaccgcgacgccggttcgattcacgtgctcggcctcgacaacatcgccgacgaggagcccgtcaaggaacaactcggcgtggtattcgattccagctacctgtatgaacagtggcaagtcaagaacgttgaacgtattgtcgcgccactgtattcatcatgggacagtggatgctatcgcaagtatctgggtactttcggccttggtggcgcgcagaacggcaagaaacatatcaaggatctttcccgcggtatgcagatgaagctgatgctcgccatcgcattgagccatgacgccaaactgctgattctcgacgagccgaccagcggactcgatgtgcttgcccgcgacgaactcatggatatcctgcatgcctacattgaggatggcgaacattcggtactgttcagcacccatatcactgccgacctcgaacgtgccgctgacttcattacctacatcaccgatggccgtctctactacaccggtccgaaagacgagtttgaggaatcgttccgcctgattaagggcggtccagacgaactggcacaactgcctgcggacgtggtgctgggctcacatatgtatgccaccggattcgatgcgctggtccggtcagacaggcttgatgctgttgcgtcggtggtttcggggcttgtcgttgaatcggcttccattgatgacatcattcgcttgaccaatgcccatgattccaatcgtgacttgagcgggaggtgagcggtcatgggggcaatactgagggtgccgcggtctcggcaacatgcattgaccactgcattgcgcgtcgatatggcctacctgtgcgtcggcgtacagactgtgttctcgttgttgttggcaccgttgttctccgtcatctttcaaggtgaagtttatggtgatggcttcggctatcgcatgggtgtcatcatgacggtattcacctgcgccatgtgggtgctcaccatggctgttgctgacctgcagaacggatatcggcttcgtggcattattccgtcttcaaggaagaaccaggtggccgcgcgatatgtggttggattggtgatttccgtattgtcggtagcgatgattgtgttgattgacgggttgcaagtgctggtcaatccggattggtcattcgcgggcaatctgtgggcggcgccgttgggaggtttctgcaccgcgctgatgatcgcgcttatcgtgcccacgggttatctgtggaccaaactaggcggtcttcaagtcacgatgatggtgatttatgtcgttgtattggctggatccatactgctatctattttgcctgcttcggtgaccagaggattggcccatgccgcgaatgccatcatcgcgcaacgattgtggctggttattgcggtattgacaacgacggttgtggcatatggaatctcgtatgtaattgcctctcgcatatttgcttcaagggagtggtgacgatgagctggaaatccgtagtaaagcaatgtcgattcgattgtgtcgggacgggtctgttcagcgtggcgaatatggtgtttctgctggttttcccggtgctgtctatcgtggtatcgctggtgatgatatcgacccatgtcgatgaacacgttgccagtggtctgatgggcggactcggaggtctggcatcggtgatggcatatatgagtgcattggggcctgccgcatccgaggaatctgcaggacacagtgccatgcgagggctgattcctgtttcacgcaccgcgcaagttgtaggtcggtacctctttctgttggtggttggcctgctctgggctctggatgtggtgatatgcggtggcatcttcattgtctttggcgatatagcagatatggggtggattggtgccttggcatcaggtgcctccatcttcgctttggctatcattcttgggtcggtgctgctggcctgtgcataccggttcaccttccgcaagatgatgatggcctttggcgcggtcatggttggcttgtatgccgtcattgcgctgctggctcgattgcctgtcgactggcaatggctattgctgaatattgccgatttcctgacgatctggtggcatacggcgcttgttctcgccgtgttgtgtctgctcgcattttttggctccatgctgatagccatccgcatctaccgagccaaagaactctagccgcgcatttgtctgaccacgaatgaaaagagaccgacaggaatctgtcggtctctttccgttatcggtgtgttatcagtccaccagatccagagcgattggctggtgtggttgctgggaatcgctttcattggccgtgcggcgcgcgcggatggcggcggctgcgcgcttgacggtcttgataacttcctgcagcaccaccacgccgaaaccgaccgcgatgattttcagccacatgtcgatcggcagcggcacggtgcggaacatcgcgccgccgaattgcaccactagcacctgaagtgcgaacatcagcgcgaacacgccgatcatcaccttattgcgcagcagattggcgaacaggctggcgttgcccagctcgcggctgttgaaggcgttgaacagctggaataccacgaacagcgtgaacagaatggtcgactgctgttcggcggtgccgcccatgaagttcgtccagctttgcgccatgaacaccacggcgatgaacgcgccggagacgatgatgcgctccagcatgccgcgcgagacgatgccggcgtcgcggcgggtgggcctgcggtccataagattgtcgcgaatcggctccataccgagcgtcagcgcgggtgggccatccatgatgatgttgacccacagcagctgcaatgcggtgaacggcgcggccagaccactgaacagcgaggcgagtaccacgaccaccgaagacaggttcacggtgagctggaactggatgaatcgctggaaattctcgtaaatgccacggccccagtgcacggccttgacaatggtggcaaaggaatcgtccagcatcacgatatcgctggcttccttggacacctcggtgccggcgatgcccatggcgatgcccacgtccgcgttcttgatggcgggcgcgtcgttgatgccgtcgccggtcaccgccaccacattgccctgggctttcagagcgttcaccacgcgcatcttgataaccggcgtgctgcgggcgatcacgcggatgcggccgatttcgcgggacagttcctcgtcgctcatttcctcgatctggcgcgcctcgacggcgatatgccgctcgtccagaatgccgagttcattggcgatggccgtggcggtcacgatgttgtcgccggtgagcatcttgagctcgatgcccgccttgcggcagcgctccacggcaccgggcacatcctcgcgcaggggatccacgatggccacgaagccatcgaacatcatgccggattccagattggcacggtcggcagcgtaatcgagggccgcagtgtcggcatctttatcggaaatatggcggtgggcaaagccgagcactcggcaggactgcgcctggaacttcgcgatctcccgttcgatttcgccgcgcgtcttggcgtcgacggcgcataggtcgagcatcttctccgggctgcccttggcaaacacggtaatgccgtcgccatcacgcaccacagtggtcatgctcttggtctccgacgagaacggatacgtgtggagcaccgtcgcgcgctcgcggcgaatccggtagtcgagtccggccttatgcgcggcgaccagtagtgcgcattcggtggggttgccgatgaattccggcatcgcgccggcctcggcttcggtggcgcccgggaaggtcacgtcggcggtgccgttgacgcagaagttctccagcagcatgcggttcctgacctgctcgggcttctccaaggcgcggcccggcgcattgtacgcctcgatcacggtcatgcggttctgggtcaatgtgccggttttgtccgagcagatcacgttgatgcagccgatggtctcgcacgccaccatcttcttgaccagcgcgttctgcttggacattttgatgatgttcaccgcgaggcacgcggccacgatggtcggcaggccttcgggcacggcggccacgatcagcgttatggaggtgatgaacgcctcggaaatcgtgtcgaacgaggcggtgccggaagccacgaaccgggccacctgaagcacgaacaccagtgcggccacaatcgagcccaccacggcgatcaccttgccgagcttcgcgagcttctcctgcagcggcgtcataccggtgttggcggcgcgcagttcgcgggcgatcttgccgaactcggtgtcgtcgcccacggcggtgaccacggcacggccattgccggcggtcacgaagcagccggaatacagcatgttcgtgcggtcggccaccggggtcttcggatcggtgaacacggcgtcggcggctttggcactcggcacgctttcgccggtgagcgcggattcgtcggcggtcagatcgttcgattcgatgaggcgcgcatcggccggcagcttgtcgccggtgctgatctgcagcacatcgccgatggtgatgtctcgctgcgacaccagcgtgacctcgccgtcgcgcaccatggtgacggtcgtgtcgtcattgatgtcgttcagcgcttcgaatgccttggcactgcggccctccatcaccacggtgatggtcacggacagggcgatggcgaagaagatgcccacgcattcgagaatgtcggcgtggccgccggccatggcgcgggtgatgttgacgcccagggtgatggccgccgcgatcataagcatgatgagcatcgggtcggcggccgtcttggcgatgcgggaaagcatcgattccggcttcggcttggtgaaggcgttggggccgtactggttcaggttgtgcgcggcctgttcgctggtcaggccttgatgcgcatcggtgcccagcgtgctgatgactgctggcgcatcctgcatgaatggtgcgggcgtctgcccgttggccgtggtcatatgttcctctcgtttggttgacacaccgcactgaaacccgcgtaatatcactcgcgtaccgcgcaacatggcggcacgcagccaaacgaatcgttgacgaccatgtatcgcatactccgcggtacatgagtctcgtcatttaaggcaaagccagaccgtaacggaactgccgacggccacgatgttgacttgccacattgcggtttgggccgaacccttcgccgcaatgctgtctactccctcatgggactattcagttgcaggaacagaacctaacaaaccacatggattttcccgttcgccggcagcatggcgattcccgccttcctagaaaaaacaagcaacacgccattggctcgttgcaggtgaaaagccgcaagaaagccgcgcgtgacaaggctcggacatgcttgaacatgcctggaccttcgacttgtgacatcagaaaacaaaaaaccgatacatgctggtaaagcatgtatcggttgggaattgtcagttagtgccgtcagcggactatcacagcgcctgggcggccttttcgacgtaatcttccatgccgtcgatggccacgacgtccttgaaccgcacgtcggcggtctcaagaccacgcagggcggccggggcggtggtgccggtctcgtgggccagcacatccatgcactcgaagtcggtgccggtggcgtcgaagctcaatgcctcgttcaccacgcgcgggaacttgtaggggctggcggtggagagcagcacgcgcggggtcagcgggtcgcgcggcatctgctcaagcaggtagtagccgcaggcggtgtgcgggtcgatcacgtagtggttctcgtcccagcagtgcttgatggactcgcgtacctgatcctcatcggcccaaccggtgccgaagatctgacgaatcttggccagcagttcttccgggatctcgtacgtgccccacttgttgaggtcgttcatcagcatggagatcagacgggtgtcgccctcggacaagtagtacagcatgcgctccaggttggaggagatgaggatgtccatcgagggggagatggtctggaagaacgggcgctggcggttgtaggtaccggtggtcaggaagtcgaacagcacgttgttcttgtcggaagccaccacgaggtgcttgaccggcagaccgagcagcttggcatagtagccggcgaggatatcgccgaagttgccggtcgggaccacaaactcgacctcatcgccgacgttgatcacctggtcggcgagcagttgggcgtaagcggagaagtagtagacgacctgcggcaccagacggcccacgttgatggagttggcggaggaaagcaccacgtgcgaattgccggcgagacgctcggccagggcgcggtcgccgaagatgcgcttgaccgcggactgggcgtcgtcgaagttgccttccacggcggccacctgcacgttggagccggcctgcgtggtcatctgtagctcctggacctgggagaccttgccttccgggtagaagacggtgatcgcggtgcccggggcgtccgcgaagccggccagcgcggccttgccggtgtcgccggaggtggcggtgaggatcatgatcttctcgtccgcgtcgccatcggccggcgtggtgtgcgccatgaagcgcggcaggatctgcagcgccacgtccttgaacgcggaagtcggaccgttgaacagttcgagtacgtaatcgtcacccaggggcttgagcggggtgatgcgctcgtcggaccactgttcgccgtaggcgtcggcgatgcactggcccagctcctcggccgtgaagtccggcagcagcgcgcccagcacctcggcggcgatttgctggtacgacttgcccggcagggaggccacgtccaccttggtcttgcccaacgcgtccgaaacgaacaggccgccgtcatcggcgatgcccttacgaatcgcctgcttggcggtcagcgaatcggtggtgctacgggtggaatggaaggtggttgtcacgatgaatccttctgcctgaaagggatgatgaatccacatcagtctagcgtgggccgtgggcagaagggccgtccgtctcgcataaccgaccggtcgcaccggcgaaaatcaccattgccatcgaacggggaccggccatatcatgaaacaggccggctgcaaacgggccatacggtaaggcgacaacggcgaatcaattgtcgcttataccaaagagcacccatgaccgcttcaccccttgcgcagaaggcaaccggtgctttcaacgcgccgatctgcgaaaccgatcctgagatcgccgaactgctggactccgaactgggccgccagcgcagtggccttgagatgatcgcctctgagaacttcgtgccgcgagcggtactgcaatgccagggctccgtgctgaccaacaaatacgccgaaggctaccccggccgtttctaccacgccgaggcgtacggcgtgaaccccgagaccttccgcatcgacccggagatcatccgccagcgcacgctcgacggtgccaagatccttgccgaacgactactggccgacgacgtcaaggccaacggcatctccgtgctgaccggcggcaccgatgtgcatctggtgatggtcgacctgcgcaacagcgagatggacggccagcagggcgaggatctgctcgccgcctgcggcatcaccatcaaccgcaacactgtgcccttcgacccgcgcccggcctcggtggcctcgggcctgagaatcggcacgtccgccctggccacccgcggcttcggaccgaaggaatacgaggaggtggccgacatcatcggcaccgcgctcgccgccggcccgtccgccgacgtgaccgcgctgaaggcccgtgtcgacaagctcgccgaagacttcccgctctaccccgacctggaccagattcactgattctttgcggatgtacgcagctccctcatcagagggagccgcgcttatatccccggctatcttcggtgcaatatgggtcgaaacgggcaatgcggcccattgtgggttactcttgttttttatgagcgatgaattgagtcctgaggtgttcgacgcggtgtgccgccaggccgatcaggccgcacacgcacaggagcgtcttgcacaggcaaataccgaagccaaaaacgaactgctgcttgccattgcggacgtgttggacgagcatgctgcggacatcgaagccgccaacgcgctggacatgctcgaatccaaggaaaacggcatggatgcgggcaagctcgaccgcctgctgttcgacgtgccgcgcgtggccgccgccgcccaaggcgtgcgccatgtggccaccctgcccgatccggtcggcgagatcgtgcgcggatacaacctgcccaacggtctgcgccttacccaaacgcgcgtgccgatgggcgtcatcggcatgatctacgaggcccggccgaacgtcactgtggacgtggccagcctgtgtctcaagtccggcaatgccgcgctgctgcgaggcggccacgccgccgaacgcactaacgccgccacgttgggcgtcatcgccccggtgcttgaagcccacggtttcaaatccgcgctggtgcaatccgtcgaccagtacgggcgcgccggcgccaccgccatgatggaggcgcgaggccatatcgacgtgctcgtgccgcgaggaggagcgggtctgatccaagccgtcgtgcgcaactccaaagtgccggtcatcgaaaccggtgccggcaacgtgcatatctacatcgacaagtccggtgatctcgccaaggccatcccgatcatcatcaacgccaaaacccagcgcgtgggcgtgtgcaacgccgccgagaagctattggttcataaggatgtcgccgccgaattcctgccgcggatcgccgccgctctggccgaggcgaacgtcgtgctgcaggctgacaccacgtcgtacgacatcatctccggcgcggcgatcgagggccttgacctcaaccacgccaccgaagaggattgggacaccgaatacctggccctcaagatgggcatcaaggtggtgtcggatctgggcgcggccatcgaccacatcaacacgcattccacgggccacaccgaatccatcatcgccgaggattatgcggccatcgaggaattcaccaagcgcatcgactcggccgtggtcatggtcaacgcctccacccgcttcaccgacggcggcgtgttcggctttggtgccgagcttggcatctccacgcagaagatgcacgcacgcggtcccatgggattgcgggagatgaccaccaccaagtggatcggttacggaacaggacaggtgcgcgcatgaacgaggacggcaacatgaacactacggctgacatggcaaacaaggcaagcgaactgcggcccgacatcgacctcaacgatcccaagctcggcctgaagatcgcggccgaacggctcagcatcgtccgctacgtgttccttgtgcagatcgaggacggcatcgcctccgctgcccagcgtgcgtcgctcgaatacgcggacgccgtgctcatcggttggcccgagaccgattcgcccgaagtcgcggacctcgacgatgcccagctcaagatcgtgcgcgaacacatggaactcatggaaggctacatcggcaaatacagccagatggagcacgacggcgaccttgacggcatgaccgacacgctcatccgcatcaccgagcgtgtggccgaggtccgccgcctctaccagccggacttcccgctgcccaccttcgccgaaattcgtcgcgtggtccaggacgaatgggatgaagacatgggcaagatcgatcccaaggaagacaatcccaccgccggcgaaatcgaagaggaaaccgaatcagccgatgacgccgccggcgagggcggccaggcatgagtggtgttatcggcagccacaaaacggctgcgtcagttcagtccgaaaaatcagtggaatccgccgagcccgccgaaatcgttgccgtcacccaaggcgaaaccgaacggcgcatgtccgacctgtccgcgccggccggggccagcagccacggcaaaggcagactttccgcacgcggcaactggcatacacgcctgcgcgtcggcatcatgggcggcacgttcgacccgattcacaacggccacttggtcgccgcctccgaagtagcttgggtatacgacctcgatgaggtgattttcgtacccaccggccgacctgtgttcaagctggacaagcacgtcaccaacgccgaagatcggtatctgatgactgtgatcgccaccgcatccaaccccaaattcaccgtctcgcgtgtcgacatcgaccgtccgggcgtcacctacaccatcgacaccctgcgcgatatccgcgcccaacatcccgacgccgagctgttcttcatcaccggcgcagacgccgtggccgaaattatgcagtggaaggacgccgacctcatgtgggacctcgcccacttcgtggccgtcacgcgccccggctactccagtccggacggcgtgaccttgcccgaaggaaaggtcgatacgcttgagatcccggccttggccatctcttcgaccgatgtgcgccgccgcgccgaacacgacgagccggtctggtatctggtgcctgacggcgtggtgcaatacatcggcaagcatggtctgtattcatacgaggactgacgattcgtacgaggactagtgtgcatttgtacgagggctggtgaggatgagcgcgaatcagtgcgcgttcatcctcaccagtgcaaggatgaacggtcaggccagtcccatcttgattttcagtgtcattacgcgagtcgccgccgccgtcacttttgaagcgaaagccggatcggacttcgcccgttcgttgaggccgtccacaattggctttacgtaatccgtctgaccgatgcaggacatgtcgccgcccgcctcgacgagctttactcccaattggcttacatcgtagctgcttaacgcttcggcagacatcgaatccgaaatcaccacgcccgtgtacttcagggcgttgcgaatatgaccgtcgataatcgtagaagaaaacaccgccggattattcgggtcgatggattgatacgtggccaacgacatcatcaccattgcaggatcggtcttggtgatcgcctggtcaaaggcacctgcctcggccccgtccaacgtggtagtcgtatccagaatgccttcggtggtgaagtcggtattgccgcttaccgcgcccaacccaggataatgtttgaccgccgcgccgacctgagcgtctcgcaaaccttcaataacggcgataccatgttcggcgttgccggccgcatccaatccgaaatcacgatccagcgcgccaatcggagcatttgaggcacgatcgcccaccaccgtgccgagcaccggtgccaaatcgacatttatgccagcagcagctaattgcgaaccccacgtgcctgccgattgacgcaatgcgtcagcggacattgtgccctgctcaacggcactgggcattgtgtcaaaaccggtacccgtcagatgctgtacctgaccaccctcctgatcggtggcgatgatgagacgattgccggccggcgcatatccttggagttgcgcggtcgcggttttgaccgtatcggcgccggtattccaattgccaatgagaatggccgagccaatgtgctcgtcggcgattgttgaagccagcgaggagggatcggaaccggcgaataacggcaccatcactaactgtcccacacgttcctcaagcgtcatggcggataccgcacgttgggcttgtgcggccgggtcgtcgttcttcttcggggaaggaacgtcggcgcgtggtaacgcacttgtctgggaggtctggggagtggtggtgttgccgtttgatgtggatttggcgaaccatccgacatgccatccgtaggctgccacgccggccaacaccactgccaaagcacatattgtcgccacgattggagtgctcctgtgccgaagttggcgtgtggcgtgtgctgagggacgcagatgttgtggccgttggctgttcataccggcaagcgtagaacggagcgtagaacagaacgctgcctcattctgtgctcagggcataacctacctcccgccctttcgataggcttgagttatgtcttttaacgatcctttctcagtactgttcggcaatggcggcgattcacgacgcaataatgcgaacaatgacgatccgatcatcctcgatgtcgaggccgatggggacggtccggcccgcaacaccaacgccggcccctccgggtcatcccgccctccacgtggcccggccaatccgcgtatcacccgtaagccagcgtccggtggctcaggatccagccatggcagcaaggttctgatcggcgtggtgctggccttggccatcatcgtcggtctgttcttcggcctgtcccgattcatcaccgatctgatgtggtacggccagctcggcttccagtccgtggtctggacccagctcggggtgaagatcggcctgtgggtggcctacgcgctgctcatggccctgaccggcttcgtttccgcctggctggctatccgggcacgccctgattcggccgacggttccaccattcgcattaacggcgatgtggtcgaggtcggcaaatccgtcagctcgaaaaccgctcgccgcgtggccgtggtgatttcgctgatcgtcggcgtcatcttcggctctcagttcaacgcgaactggagcgagattctgctcatgttcaacgcgcagtcgtttggcaccaccgatccgcagttcggtctggacaacggcttctacgtgttcgtgctgccgggcctgaagctcgtgctcgccgccgtggccatgctgctgggcgtgggccttgtgttttccgtggtcacgcatgtgctgatgggtggtatccgcattaccatgccggttaacggacgcggcctgttctccatcaccaagcgttgccgtcgccagcttggcatctggctgatgctcaacatgttcgcttgggcagcgcgccagatgatcggcgtcttcgaccagctcaccgtgcagggttcacgcatcaccggtgcctcctacaccgccgtacatgccaacatccccgtcacgttcatcatggccgcgctgaccgccatcctcggcgtggtgctgggcatctggctcatgcgttcccacacgctcgaaggccaggcgtccatcggcgtgcgcgcttccgccgcgctcaaggcttggcgtgtgccggtgacctccattgccgtcgtggtcgtggtgggtcttgtgctcaccgtggcatggccggtgctgttgcagcgcttccgcgtcaacccgaacgcacaggagatggaatccacctacattcagcgcaatatcgacgccacccgcgccgcctacggtcttgacaagctcaagaccgagcaatacaaggtgaccgacaagggtgagcagggcgctctggccaaggaggccgacaccaccgcgcagatccgtctgctcgacccgcaggtcgtcagccccacgttcaaacagttgcagcagtccaagcagtactacaccttcgccgacaccctggcggtcgacaagtacgagattgacggcgtctcccaggacaccgtgattgccgcccgcgagcttgacctggccggcaatgacaaccgcaactgggtcaatgaccacaccgtgtacacccacggttacggcgtggtggccgcttacggtaacaaggtgaccgccgacggccagcccgaattcttcgaatccggcatccccactcagggcaagctcaccgaatccgaaaagtacgagcctcgcatctacttctcgccgaacaccaccgaatactcgattgtcggtgcccctgaaggcacgcaggcttgggagttcgactacccgaccggttcggaaggtgctctgaccacgttcaagggcgacggcggcccttcggtcggcaacctgttctccaggattctctacgcgatccgcttcggctccgatcagattctcttctccgaccgtgtgaccagcgaatcgcagattctctacgatcgttcccccaaggagcgcgtggccaaggtggcgccgtacctgacgcttgacggccgcgtgtatccggccgtggtcgatggccgcgtcaagtggatcgtcgacggctacaccacctccgacgcctacccgtactcgcaaataaccgacctcggctccgccaccaaggattccaccaccgtctcttccgcaacggtctcgtccctgggctctcagaaggccaactacatccgcaactcggtcaaggccaccgtggacgcctacgacggttccgtggacctgtacgtgtgggatcaatccgatccggtgatcaaggcatgggagaagatcttccctggccagtaccaccagctctccgatatctccggcgacctgatgagccacatgcgctacccggaaagcctgttcaaggtacagcgcgagctgctctccaagtaccacgtgacctccgccaaccagtactactccggcgaggacttctggcagacgccggtcgatccgaccgaatcccagtcccagcaggaccaggacatcctgcagccgccgtactacctgaccttgcagaccggtggcaccgaggaaccggtgttctcgctgacctccacctacattccggctggccagtccacccgtgagatcctgaccggcttcctgtcggtcgactcggatgccggcaatgagaagggcaagataggctcgaactacggcaccatccgattgcaggagctgcccaaggattcgaacgtaccgggccccggccaggcgcagaacaacttcaacgccaacgccgacgtgtccaaggaactgaacctgctgcaatccggcgacacgcaagtggtgcgcggcaacctgctcaccctgccgctcggtggcggactggtgtacgtgcagcccgtgtacgtcaagtcttcgggtgcgacttcattcccgctgctcaagaagacgctggtcgcgttcggtgatcaggtaggattcgcggatacgttggatgaggccttggatcaggtgttcggtggtgattccggcgcggccgcaggcgatgccgagaacgtgtccggtgacggatcgtctggtgaccagtcgtccggcgaccagtcgtccggcacatccggtgaccaatctggttccgataccaatggtggccagtccggcaccacggacggcaagtcggattccggctcgtcttccgaccgtagccccgaactccagcaggcgctgaacgatgccgcccaagccatgaaggacagccagtccgccatgaagaacggcgactggaccgcctacggcaaggcgcagaaggagcttgaagacgccctcaacaaggccatcgagctcgacaagtagttccgacaggaattggctcccctcagggtgaggggagccatcgccgaaggcgactgaagggagtcggttacctcaactgacatagcccgtccttatcataaggacgggctatttgcatattcaaaggaacctcatgccatacaccttccgtccggccgtcgaatccgacgtccaagccatcgccgacatctacaacgcctcagtgatggccggcggtgcgaccgccgacctcaccccgcgcaccttcgaccaacgccgcgcctgggtcgaatcccatacgccgccctacggcgtttttgttgtggaatcggaagacggttcaatcatcggcttcggtgcgctctccgtgttctatgaccgtgcgggatatgacggtgtcaccgatttggcctattacatcgatccggcatggcaaggcaggggagtaggcacgttcatgcttgacaggctgctcaccgaggcgcgggcccgccacatgcgcaaggcctgcggcatcattttcgccgataacgccggctccattgccctcatgcaccgcttcggcttcacccaattcggactcatgcccgccgctgccaccgactccaccggcaccatgcgggacatgtcctactggtatttggacctgtagccttgcagtaagtcatttcagtcaagaaaagtgtgaggatgccggagcaaacgagcttgacggcggcgttgagtacaatcttgacggttggatccggccgggcatgggccagtgcgcgaggcgaacgcgcgcatgacgtacggaacgtacagaacgtgcatacgggaataaaggaagacggacgaggagcggattatggcatcggatttctggctgattgcgggactgggcaaccccggcaaaaaatatgaggacacgcggcacaacatgggcttcatggccgccgacgtgctcgccgaacgttggacggtgaacttcgccgatcacaagggcttggccatgctcggtaaaagcgtgatgaacctggacggccgcaccgtcaagttctttctggccaagccgctgacttatatgaatgattccggcaatgcggtggcttccattagcgcctattaccagatcgagcccgaccatattgtggtgattcacgatgacatggacttggaattcggccgtatcaaggtcaaggcaggcggctccgcaggcggccacaacggcatcaagtcgattgaccgttccctcggcacgccgaaatacgcgcgtgtgcgcatgggcgtcggtcactccaagcgcggtgcgaacgcgcatgacaacacggtgaactgggtgctgggcggattcggtccggaccagcgcaagcagctgcccgaattcctggctgacggcgccgacgccgccgaggacatcatcttccacggtcttgccaagacccaggagaagttcaatggccggtgaggcgacgcacccggacctgatcaacggctcactggcaggcatcctgtctgagctggaacaggacaagaccttcctgaagctcgccgccggcgacatcgaggcttcggacgacgtcgacaactccgtcctggccggcatccccgaaggtttgcgcccggctttggccgccgccatcgggcagggtgtggccggcaaacccggcaagccggtcgtgctggtcgtggcctccggccgcgaagccgaagagaccgtgggctcgctgcgctcctggtatgatggcgacccgaacgacatcgcccagctcgaagcctgggaaaccctgccgcacgagcgtctgagcccgcgcgcggacaccgtggccagccgcatggccgtgttccgcagactcaagcatccgagcgataccgattcgatgttcggcccgattcgcattctcgtcatgccgatccgctcgctcatccagccagtcgtccaaggactgggcgatgtcgagccgctcgtgttcaccgtgggggaggacctgcccctcgacgaagccgccaaacgtctgatcgaaaacgcctacacgcgcgtggacctggtcatggaccgtggcgagttcgcggtgcgcggaggcattcttgacgtattcccgcccaccgcaccgcacccggtgcgtatcgaattcttcggcgacgaaattgacaccatcaaggaattccacgcctccgaccagcgtacctacggcgacggtctcaagaccatctgggccaccgcatgccgtgaactgcagctgaccgacgccgtgcgcacccgcgccaaagccttggtcggttcgattcccaatgctgaggacatgctcgaatccatcgccaacgccattccggtcgaaggcatggaatccctgatgcccgcactcgtggaccatctggaaccggtgggctccatgcttcccaagcacgccgtgatcctcctgagcgacccggagaaactacgccgctccgccgaagacttggcaaaaaccgcgaacgagttcctggccgcaagctggcatgtggccgcctccggccacggcgccggcgcgcccatcagcttcgacgaagccagcttcctcgactatgcggaaaccatcagctccttcgaatactccgaacatccggtgattcgcctcaccagtttcggcgtggacaccacgttgaccggccatgtgcagctcgacgcccagaacccggccgaattccgaggggatgaggccaaggcctcccaaggcattgaaggcctgctcgatgccggcttccacgtcaccatcaccgccgctgcggccggcaccttggccaggctcaagcgtgcgatcaacactaccggcatcgccaatttcgacgtcatccgctctcaggccatcgacggcttcgtggacaaagccgccaaaatcgctctgctcaccgaacgcgacctgaccggccgcacttcagccgtggccgtggccaaaacgccgaaacgccggcgcaaggccatcgacttggtggagctcaaaaaaggcgattacgtggtgcacgagcagcacggcattggccggttcatcgaaatgcgtcagcgcaccatcggcaccggcgccaacaaaaccactcgcgaatacctggtcatcgaatatgcgccttccaagcgcggcgccccggcggacaaactgttcatccccaccgaccagctcgaccaggtcagcaaatacatcggcgccgaagcccccaagctcaacaagctcggcggctccgactgggcggccaccaaggccaaggcccgcaagcacgtccacgagatcgccgacgacctgatcaagctgtactccgcccgccagcgcgccaagggcttcgcgttcagcccggacaccccatggcagaaagagctggaagacgccttcccctatcaggaaaccgccgaccagctcaccaccatcgacgaagttaaatccgacatggaaaagcccgtgccgatggaccgcctcatctgcggcgacgtgggcttcggcaaaaccgaaatcgcactgcgtgccgccttcaaggccgtgcaggacggcaagcaggtggccgtgctcgtgcccaccacgctgcttgtccagcagcattacgagacgttcagcgaacgattcgagggtttcccggtcaatgtggcggccatgagccgattccagaccaccaaagagatcaacgagaccatcgaggggctggaaaccggcacggtggacgtggtcatcggcacgcacaagctgctgaacccgaaaatcaagttcaaggatctgggactcgtcatcatcgatgaggagcagcgtttcggcgtggaacacaaggagacgctgaaagccctgcgcaccaacgtggacgtgctgtccctgtctgccacgcctatcccgcgcacgctggaaatggccgtgaccggcattcgcgagatgtccacgctcgccaccccgcccgaagaccggttgccggtgctgacctatgtgggcgcctacgaggatgcgcaggtcaccgcagccgtacgccgcgaactgctgcgaggcggccaggtgttctatgtccacaatcgtgtgcaggacatctcgtccatcgccgacaagatccacacgctggtgcccgaggcgcacgtcggcatcgcccacggcaagatgggggagaagcagctcgaccagatcatccgcgacttctggcatcgcgacatcgacgtgctcgtgtgtaccacaatcatcgagaccggtcttgatatctccaatgcgaacacgctgatcgtcgaccatgccgaccgtttcggcttgagccagctccatcagctgcgtggccgcgtcggtcgcggccgcgagcgcgcgtacgcctacttcctgtacgacccgtccaagccgatgaccgagcagtcccatgaccggctcgccaccatcgcgcagaacacggcgctcggctccggtttcgatgtggccatgaaggacttggaattgcgcggcaccggtaaccttctgggcgacgagcagtccggccatatcgagggcgtgggcttcgacctgtacgtacgcatggtgtccgaagccgtggaaaagtacaaggagcccgaagagaacgtcgagccggtggccgtgtccatcgacctgcccatcgaagcgtcgattccgatcgagtacatcgattcggacaagctgcgtctggaagcgtaccgcaagctcgcctccgcccgcaacgaggccgatctgaaggatttggaagaggaactcaccgaccgttacggcaagccgccggtcgaattcgagaccctgttcgacgtggcccgtctgaagttcaaggcccgcaagctcggcatttcggagattctcgcgcaatccaaccgcgtgcgcatcggtcgcatcgacccgcccgaatccatccagatgcgtatgggccgtatttacaaaggcacccaataccgtccggtcgcccaccagctcatcgtccccaccccgttcaccggctccctaggccaaggccccatgagctccgaccaggtagtcctctggaccaaccagttacttgatgatttggcatggaccccgtcgtcaagcaaacggcagagccgtttgtagacggggtgcgaggcgacagtcgagccagctatggctcaccgggcaacatccggtgagccatattcatattcatgccgtcgtttgtgacgatgattcaccccagacggaatcgttccgactgtccagcgagcgagattaagtgactgctatgagcgaaacgactacgaaccgcacgaaccagagcgcgaccacggcgacacttgccggctatgagattccccgcctcggcatgggcacgatggcgctcgccatcgaggggcgcccctccaaccgtgatcaggcaatcgagaccatccatgccgcgctcgatgccggagtccgttatttggacacggcttggtcttattatctgcccagcgcacccggaaccggcgagccggaggatatgggctatggcgaatatctggtccgcgatgctctgcactcgtggcatgggccgagagaacaggtgctcgtggccaccaaaaccggttggctgcgtacgcttgacggcagcggcaactacggctggcaggccgatgcccgacccgaaaccatgatcgccaatgccaaggaatccgccagccgcctcggtgtcgacacgctcgatttgctctactcgcactgcaatgatccgcaggtgccgtacgaagaccagatgggcgcactcaagcagctcgtggacgaaggtgtggccaaagctgtcggcatctccagaatcgccaacgcggacatcgaaaccgcccgcaatattttgggcgatcgtcttgtggccgtccagaaccagttctccccggtccaccgcgaccccgaacacacgttggaaacctgcgaaaagctcggtttggcttttgtctgctggtcgccactcggcggattcctcgacccgttcaacgagcatctgttcgaccggttccgcgaagtcgccaagattcacgactgctcctaccagcgcgtcacgctcgcgtgggaacttgcgcaataccaatatctgttcacgattccctcggccagaaacccgcaggagattcaggactcgttcaaagccggcgaactgaaattgtccgacagtgagatcggctacctcaatggcaaggacgttgactgagcgatttcgtccgtactgccttgcaatcaggcggcacactggcattgtgagcgctaacgctaaattttgggcgtgttgttcacaacgtccacaaatcgcactactcttaagaatgtcattcaagatacacaaccgttttaaggagtagttgtggcagtaattgaaagcgtgtacgcgcgtcagattctcgattcccgcggcaacccgaccgttcaggtcgttctggacaccgaagacggcgcccagggcctgggcctggtcccgtccggcgcctccaccggtgaggccgaggcttgggagcgtcgcgatggcgacaagtccgtctacggcggcaagggtgttcttaacgcggtcaaggccgtgaacgaggtcatcgctccgaaggtcatcggcatggacgctgctgaccagcgcgctctggacgacctgatgatcgagctcgacggcaccccgaacaagggcaagctgggcgccaacgccatcctgggcgtctccctggctgctctgtacgcttccgccgagtccgccggcctgccgctgtaccgctacatcggcggcaccaacggccacatcctgccggtcccgaacatgaacatcatgaacggtggcgctcacgctgacttcgccaccgacattcaggagtacatgatctccccgtacggcttcgacacctactccgaggctctgcgcgctggcgttgaggtctaccacaccctgaagaacgtcctgaagaaggaaggcctgaacaccggcctcggcgacgagggcggcttcgccccgaagatgaagtccaacgaggactccctcaagtacatcatggacgccatctccgccgccggctacgagcctggcaagcagatcggcatctgcctggatgtcgcctcctccgagttctacaacaaggagaccggcaagtaccgcttcgacggtgaagagcgtgactccgcctacatgctcgactactacgagaacctcatcaacgagtacccgatcgtctccatcgaggacccgttcaacgaggaaggctgggaagactgggctgccatcaccgctcgcctcggcgatcgtctgcagttcgtcggcgacgacctgctggtcaccaacccggctcgtctgcagaaggccatcgacctcggcgccgccaactccctgctggtcaagctgaaccagatcggttctgtcactgagaccctcgacgccatcgagctggccaccgccaacggctacacctccatggtttcccaccgctccggcgagaccccggacaccaccatctccgacctggctgttgctaagaacacccgccagatcaagaccggtgccccggcccgtggcgagcgcgttgccaagtacaaccgcctgctcgagatcgaggaggagctcggctccaccgctcagtacgccggctacagcgccttcaaggcctgcaagaagtacctggccaagtgagctgaaacgcccgtaaaggcgtgagtttccactgaagctcgatacccgtcgtattcgtcaagtcgaatgcggcgggtattttcgtgtgacatgagcaagtcgtcccgtaccggcaaacctggcaaaaccggcaaagcacaagttaggaaaaaagggtcggcggggcctatagcgttcttcgtctccctgttcattatcgcccttggcaccatccagctggtctccaccttccacacctatgccctgaacctggccgaactcaatggtctcaagcgtgaggaggcttcgctgattgcccaaaagcaggagttggaaaacgacatcaagcgttgggatgacaaggcctacatcaccgcccaggcccgtgaacgcctcggcttcgtattccccggcgaacaggccgtgcgtgtgcttcatcccgaagccgtgaccggctccgatagcgaatcccagaaaacggaagattccagtaacagcaacaaaaaagtcctgccatggtacagcgaactgtcttactcgctcaaaaaggccgatgagcctgtgaccgatagcgagtccggcaaatccgatatttccggttcctctgactcgtcatccaacgactcatccaagcggtccgataagtcagaccagaacacccaatccgatcagaacacccaacagaatacccaacagaacacaggggagggaacccaacagtgaccatcgatatcgccgccaaggccaaggcccttgtcgataccgtgcttgccgagcccgccaacaatcatgacatcgacctggtgcagcgtcagctcggccgatacccgcgcggcatggtcgccgtgggggcgcgatgcgtctgcggtaggccacttgccgtaatcacccgtccggtgttgcccggcggaatccctttccccaccacgtgctatctgaccggtccggaagccgtcaaggccgcctcccatgtcgaggccgccggcgtgatgcagcaatacaacgacatgttggcctcggacgaggagctcaaggccgcatatgagcaggcccataacctgtatctggcattccgccacgaactggcaggacgtcttggcgacagtgaggagcatattgaaggcacttcggccggcggcatgccggtgcgcgtcaagtgcctgcatgccctgctggcccagtccttggttatggggccgggcgtcaaccccattggcgatttggtgctggaacgcgtcaaagacgagttcgatccgaccgtctgccgttgcacgctggacgattgatcaacagatgagccagcgcgaacagtccattcatacgcactaagggatacgaggagaaggcaatgagcaaggaatccgtaaccgtcgccggcattgattgcggcacgaactccattcgactgaaaatcgcacgtgtcgatgccgatggcatgcatgaggtggtgccgcgcatcctgcgtgtgatccgtctcggccaggatgtggacaagacccatcgttttgccgacgaagcgttggaacgcgcctatgtggccgctcgggaattcgccggtgtgattgccgaacatcccatcgacggcctgcgtttcgttgccacctctgcaactcgtgacgcggaaaaccgtgaggagttcgaggatgagatcgaacgtatcctcggcgtgcgccccgaagtcattcccggcaccgaagaagccgacctgagcttccttggtgccacttccgtggtcaatcgcgacgatctgcccgccccctatctggtggttgatctcggcggcgggtccaccgagctggtcatcggtggcgacggcgtcagtgcgcccactacccaggttcagggcgcgttttccatgaacatcggttccgtgcgcatgaccgaacgtcatctgaccaatgatccgccgacccagacacagatcgatgaggccgttgcggacgtcgatgaacatatcgatgaggccttccgcaccgtggacgcaggcaaggcccgtaccatcattggcgtgtccggcacggtgaccacgatgaccgccttggccatgggattgaaggaatacgatcacaccgtggtcgacgggcatcggttgagccttgaagacgcctatgccgtggacgacaagttccttaggatgacgcgcgccgagcgccgcgaatacaagaccattcaccccggccgtatcgatgtggtcggcggcggcgctgtggtctggagccgtgtgctggcgcgtgtcagcgaagccgccaaggccgatcatggtgaagccatcgattcgttcgttgccagcgaacacggtctgctggacggcattgtgctcgattatggtcgccggttgctggctcaatagcgtaagtggtaagtgcctccagcgggctgagccgttaagcaaacagctcggtgggctgtttgtaggcgaggggagcggctatgccgcgacggctgcacgaagtgcagcaacccgcaagcaatgctcagggcaggagatagcttataatagaaaagttggcctccgtggcgaaatggtatacgcagtcgacttaaaatcgatcgcttcggcttgtgggttcgagtcccaccggaggcaccttgaaatcggcctgtggccggtgccgtttttgcggctgtgccgcggtctctccccagtcggcttcgccgacagcccccctcgtcagagggggctcgcagctcattatgtggagagcttataaggccgaaacaaaaggccgttaggctatgtggcgttgtgacgatgtacctgatgaaacgaggaatccacatggcttcacgctggaccgatgtcgaacgagtcgaacaaggcgccctgcccaccatgcttgcccaagccgtcattgcgggcactgcactcaccgttggtgccatcgcctgctcgggattctatctgtccatgatcggcaatgtggccgcattcctgccatgggcgactatcgtgatactgatcgccgtggcgttcacctacatcgtcggcttcgccctgttgtggtgtgccgaagccctgaccctgcgtgccaacgacaaactcaagccatggctgtacggcgtcgtcggattaatcggctacggcgtgtggggcatgttcgtgatgagcgcgatgatgaacacgctgaaccagccgctgaacggcgtggtgttgtcgaacggcgatgtgatggccctgaccgtcaactacgcggtgttcggcttcatcgccttcctgttggcacaggcgtacgcgcccaaaatcgccaccaagaagggactgaccatcgggctgatggtggtgcagatcgtattggccatcatcggtatcatcgtactggtcatgatgttctccgcactgtctcactgactgacttatcgctcgccggcacgacgcgcgcgtccatcatcgcacaaggcgaaagcgattccgggcgctgggctgggatacgatatcgtgatggcatgacgcctggtaacaccggcatgccgaaccagcaggggagaaggagccaaatgttcagtgtgcttgacatgttcaccatcggcgtcggaccttcatcctcgcacaccgtaggcccgatggtcgcggcacatgctttcgcctcctcgttgcaggccgaccatttggtcgatcgcaccgcacgtgtcaaaatcacgctttatggttctctggcgctgaccggtctcggccacggcaccgatcgtgctgcgatggccgggctcgaaggcaatctgccggccaccgtggataccgaccacatgatgcacatccgcgagatctgcgcgttggacgatactctgaacctcgccggcctcaaacgcatccatttcgactacgaccgtgacgtggtgttcgaacaatggaagcgcatggccgcgcaccccaatggcatgcgattccaggcgttcgacgccgccgcaagcttggtcgacgaacaggtctggtattccatcggcggcggattcgtgcgcaaaggcgctcccgaagacccgatgattggcattcatgaacgccctccggaaggcgcctcctttgccgatgcggacgagtcatcatccactgatttcggcgtcgaggcaccctacccgttctcatcatgcactgaactggtgtcgttatgccgggaacatcatctcagcatcgccgaacttgtatgggccaacgaaaccgcttcacgctcgggcatccaggtccgatccgatattgatgccatctggcgtgttatgcgcgcctgtgtggaccacggatgcacctcggcggaacccacattgcccggtggccttgacgtaccccgccgcgcgccgaaaatgtatcggcgtctcgcctcgaattccgatgtgctgcgccgcgacagccggcgcaaagacgccgtgctcgagtcttccgacgccgcatgggtggatctcttcgccttggccgtctctgaggagaatgccggaggcgggcgcatcgtaaccgctccgaccaacggttccgccggcatcattcccgccgtgcttcactattactggcatttcgtggacaacgccaatgaacagggcgtggtcacgtttctgctgaccgccggtgccatcggatacctgttcaaacgcaacgcctcaatttccggtgcggaagtcggttgccagggcgaagtcggctcggcctgttcgatggcggcggccggacttgccgcagtcgtaggcggcacgccggaacaggtggagaatgctgctgagatcggcatcgaacacaacttgggtctgacttgcgatccggtgggcggattggtgcagattccatgcatcgagcgcaatgccatggccgccaacaccgccatcaacgccgtgcgtatggccatgctcggcgacggctcacacatcgtgacccttgatcaggccatcgaaaccatgaagcagaccggtgaagacatgatggccaaatacaaggagacctccaagggcgggcttgccgtcaatgtcgtcgaatgctgattgacatgtccggtattcaccagcatgatgaccggaattgacgtatacggccagcgtgtcgtatcgcacagggatgaaggactaccgccgattcgccgatggtgctaaggtagggcgcattgtgtctttgaaggaggactaatgacagatcagatgcctcaggtgaacgccgaattcggcaccacgcccgttatcgagttcccgacgcccgaagccccgaagggcctcaaggttgtggagctgaccgagggagacggcccgatcgtgcgtcgcggcgacaccgtcaccgtgaactaccacggcgtggtgtggggtaaggacaccccattcgactccagcttcgaccgtcatcagcccgccagcttcggcatcggcgtgggacaggtcatcaagggctgggaccagactgtgccgggccataacgtgggttcgcgtctggtggtttccattccgccggaatacggttacggttcccgcggcatcccgcaggccggcatcggcggcgaggacacgctggtgttcgtcatcgacatcatttccacccgctgaccgtaggtcagcacatgacgaacgccggggtcatatccggcgttttgtcataaataacgaagattgtttcagcatcgacaacggttcaggaggacgatatggctgaggacaaggtctacctgctgacgcaggaagcatacaacaagatgaaggaagagctcgcccatcgtgaaggtgagctgcgtgaggaaatcgcgcacaagatcgccgtggcgcgtgccgagggcgacttgtccgagaacggcggctaccaggccgcccgtgaggcgcagagcaagaacgagggccgcatcaccgagctcaccgtcaagctgcgcgattccaagatcatcgagaatgctccggaaggcaccgtgggcgagggctctgtggtgaccatcgagctcaacggcaacgagatgacctacgtgctcggcagccgtgacatcgtggccggcactgactacgacatcatgaccccggattccccgattggcaaggccatcgagggtgccaaggtgggcgacgtcgtttcctacaccgcaccgaacggccgcgagctgtccgtgacggtcaaggccgccaagccgctggcctgagttaagtgactggtatgcccccgtaggcgggggcatacttatatgtcgtagcgcttattgccacagcgagacgatcaccatgtagatggccaccatatggcaggcatatccggccaccgttccgcagtggaaaatctcatggaatccgaagacgcgaggccaagggtcgggcttgcgcaaggcgtagacgatggcgccgaggatgtagcaggcaccgccggcgcacagcagcaccaccacggctggccccgcatacggcgaattccagaacatcaccatataagccaggccgtagatgccgaagatgatgtacaccaccgtatacagccagcgtggtgcattgatccagatcacatgaatcacgatggcgatggccgtgcacgcccacatcgatatgatgatcacattgcgccagaacggttccagcgcaaacgaaaccggggtatacgtgccggcaatgagcaggaagatgttgacatgatcgatacgccgcagcacatcggtgacgcgcgggctccaatcgcccagatggtagcaggccgaattggtgaacagaatcagcgacgctgtcatgaacacggcacacgcccacttcagactcgcgccatgtgccaggcatataagcacgatgcctgccgccaatgacaggggagcggcaatcgcgtgaatccagccgcgcatcaacggctttggccgtccgtgcacgtcgagacgaatcttgcgttccacttccgcaggggcaatgccctcgattttcagcgcacggttctccgctttggcgagcttgtgccgggccttctcctcggctttggctcgaatggcctcggccttgaactgggccttggcccgtacggcatcagccttggcctgcaactcctgttcgcgcgcctcgatagccgcctgacgcttggatgcgatggtggcgtcctctgcaatcgccgcgctgttatgagcgtcgtgatgcatcgtcttttccgagtcgccggttgttgatgccatggtgatgcccccgtttcacgagttgacgatacgcttcttacgctgccgtaacctacgttagcgtaacttttatgcttgtcaataccgactcgcacgaacactatcacccaatggcggcgatactatggaatccgaagatgagaacgtcgcagcaataaagggctcggcgatggtgcattgcacggagtgtgggtttgccaacgagcaaggaaatgccttctgttcgcagtgcggaagcccattggagcagcccgaggccaatccggcggcccctgcttctcctgaacctcccgccgggcgtcctggcgtcgatcacaccaaagcgcaggcaaacgcgatggtgggttccatggacacagcaatgccggcaatatggtggcggcttcggatatcaaactgtacgtgatgcttgccgtgtacgataaacaacatgccggcaccttgaccacgggcgggaagccgtgcaacgcgattggcgcggtattgaagatgcgatgtcgtcatagtcgtcgtacttgcccgtgtggcttgccgcgacggcggcggtgcgtctgcgtatgatagggatatggctgatttttcacatatccttgcaacgcgccccgacttcgacgacgaggaccgcgagtggctgcatcatcttgtcgccgattggcaggtgatcgccgatttgagctttgccgatctgctgctgctggtacaggatggcgatggcaaatacgtggtggccgagcaatgccgtccatccaccgttatgacgctgcgggcggaagacgtggtgggaaacgtcatgccggacgacatggtcggcgaattggacgccgccatgctctccagcgtggtgttccgctccacggtattgagaaccgtgggcaaggcgaccgtctgcaacgtgtacgcgccggttcggcacaatggcaagaccttgggcttggtcgtgcgtgagaccaatatggccacacgagaatccaacggccgatatgagtcggaaagcatcaacgccggcaagcatctgtacgagatgattccgcgaggccaattcccctacaaggattcggtgatgagccaacgccatatcgctcgcgtggcggacggcttcatcatcctgaccatggacggcgtggttcgatacgcagccccgaacgccatcagctgctttaggcgtctcggtttgctgaccaccatgcctggccattacctcagcgaacttggcacacagctattgaaggagaacgaccctgttccggaaaccctgccgttggtgttgacaggcaaagccgcggtcgactccgaactcaacgccaaccgttccgccgtctcgatgcgctcgttgcccttgtatgacaacaacggccgtatcggagcgattctgctatgccgtgacgtcaccgagctgcgccgtcgtgagcaggagctgcagaccaaggacgctacgatttccgagattcaccatcgtgtcaagaacaacctgcaggccgtctccgcattgctgaggcttcaggctcgtaagaccaagtcggatgaggtcaagaaggaattgcaggaggcgcaacgccgcgtgcagaccattgccatggtgcatgagggattgagccagaccgccgacgaggtcgtcgacttcgacaaggtgatcgccaacctgctgcgcatggccgtggacctagccacgatgaaagaccagcacatcgatatcaactacatgggcaagttcggcatgatgcccgctcaggatgccacgccgctgtccctcgtgctgaccgagctcatcaccaattcggtggagcatgggttcgaaggccgcaaggatggccatatcacgatttccgtgggccgctccggcccgaacctcaatgtggtggtcgaggatgacggttccggtctcggctccgaagaacaggggggattggctcgttcttccggttccggtttgggcacgcagatcatcaacacctttgtgaccaatgatttcggtggttccgtgcattgggagccgcgccgcgaaggcggcacccgcgtggtgcttgatatgaagctcagggccgctcaggacgagtgatgcgaagcccgaaatgaggaaaccctcccgagtgggagggtttcctagtatgacgaagaaataatcaaaacatcagatttgcatctgcatggcctgagaacggcgggcacgcatggcgcggcgcttcagcgcacgacgctcgtcttcgctcaagccgccccacacgccgtaatcctgattggtgtccagtgcgcacttcaggcatgcgtcaatcaccttgcaggtgcggcacacggccttggcctcctcaatctgctgataggctgcaccggtgttgcccaccgggaagaagagttccggatccttgtcacgacatgcggccttggctcgccaatcaaaagcgctgctcattgcttgcctcccttaaaagccccgtggctggtgttgttccttaagtccagtaccaaggtaaccacgaaccgtggtgattttcaagaggttttgccgagaaaaaaccgaagttttcacgaagcgcactgcaccagacatgccgatgtgccctcgatgagcacggcccggcccgcgttgtcggcatcgatatgactcatcatatccaataggcgagcggggactccggccataaggtcagacgttcgttccccgcacgggaacacgattctggtattgcaatgctctggtatacgtatcgggcgaatcgtgctgacggcgaataccacgctgacggactcatcggccaacgcatgtgtgaaagacagcgcctgctcgtcggtgcggaatgggtcgaacaactcatcggcgtcgtcgacgaaccacacgatatgcggaggcggtggtgcatccgagctggcatacggcgtgcgacggccgccatgaagccattgcgagctccatacccgacgatgcagggaactgacacgtaccgccaagccatcagccatgctggcgtgtcgagccaatgttttcagcaacgtggttttgccgcgcccctgcgggccgatgacaccgatattgccgccggtgagggataccgtcgcctctcgcaggttgatgccatcgtcggcaagtccaaatcgaatgcgttgcggtgcgtggtcggccacagtccggtcttttacgtgccgggggagtggcgcggtaaacagggacggctgcggcgggctcccgacgaaccgcgatgcgaacgcgatctggcggcataccgcatcgatatcgcgtgccgttgcacagcggaatgccgtcacctgttcggaatcgttgcagaacgccgcaccgggcattgccggactgaggtcggcggcacgaccatcaccaagcagctcgcatgattgcagacggtcccgaacccgtaaacaaatgctgacggacatatttgccttcatatcggcactgacctgacccatgggattctgcgtacaggcgatcagatacatgcccagtgacctgccgagcgaggcaatacgcaccagacgattcacataatccgggagctggtccttcagggcatggaattcgtcaatgaccacgatcaggcgcggtggtggattgaccatatcgcggatatcggaagcatggacagcggcggacagctgttcacggcgtgtcagttcggcttccagcgcacgcaacgcgcgtacggcatgcgccagatccagatcgcatacgctgcccacggtatgcggcaaccgttcgagtttgcggaacgcggaaccgcctttgaaatccaagaacacgaaattcagatgctcaggcccgttcatcgaggcgagcgccagacaccagctttgcagcaacacggattttccggaaccagtggtgccggccaccagagcatgcggcccctgacggttcagatcgagcatcagcggctcgcttccggtcatgccgatcggcaccgcaaggtcaaggggttcaagccagcggcccacaatggcgcgccatggcaggcgtgcgaagtgcagcagcgattctatcggctgcgacggcgcatgacggaggtctgcggcgcggtcatcggcgtcgcccgtgataccgacatcgatcgttgcctgttgcggagcgtgagccttctccgggcctggaggcgaggggagcgtcagcagcagggacacgagacaggcgaatatgcccggtgcgatcatggcggcgaacagccattgcccgtgcaacagcagtatgaccatcatcaatgcctgcgcgatcatcgggcacgccgcggcaaacatggtcaggcgggcgcgcaatggcggcgcgcccaaacggtgcttcgcccgggatacggcggatgccgtatggacggaatgtcgcttcgaatcgttctgctgtgatgtcatgcttccagcgtgggggaacgcatgccgaaagcgcaaaccgaatcaaggtatgtggttctagcttgccgagttatccacatgacattttgcccgtgcatgattggcggtgtaggcaacggtgacgatcatgcgccgatgatgaagccgatgggctccgggaaagcgtcggtcagccttccgccagattgcccacggtgccggccttatgcgtgccgtcggcaagttgattgaacagttcggtgttcttggcgtcgtcaagcagcaccgaggaaccaacgccatcaacgtaataatcggggtcggaccagtacacgctgccggagatgccattcgagccggtggcgcttttgaacgccaacgccatggtgagcaacgtgtaagggtcggtcttctcgtccacggtgagtgcgctcatcgcggcattggacactgccacgattttggacggattggtcagggtctcactgctggaagccttcttgacgatggccgagatgacctgtcgctggcgttcgttgcgcccgaagtctcctcgcgcgtcggcatatcgcatacgagagaaggacaatgcggtggaaccatccgccgtatggcatcccgccttccagttcagtccggaataggaatcctgaacatcctcgtcatagcacagttcgataccgcccaaggcgttcaccacgttctgcagaccgccgaacttgatctgtgccacatgatcgattttctggccggtgatctgctcaacgttgcttaccaaagccttcttgcccgcaatcagcgccaccgcattgattttcatgtactggttatcgacgttcatgagcgaatcgcggggaatggaaaccaacgaactcggcccgcttttgggcttgatcagcaccagaatcgtatcggtcctgaagccagagatattgtctacgccgccgtaatcggtggaaccgtcacgctcatcggagccaagaatcagccaagtcgaggccggcgtgttgggggtgtcggtcagccagtcgctccgattcagtttgctgtccacccattgccaggcaccgaaaacggaaagaatcaacgccgccaccagcaccgcaatcgcgcataagatgctgcgcaaggcgcgcggccggtgtgccgttacagttttcgccgttgccgccgccggccggccaagatggctgaacttcgtggacacgtttgctgctggcgatgagggccgggaaaccggcatatccgacggattgcgcacggcgttgcgggatgagccggaagacatccgcgctcgcgacggcggaatgctgcgcggtgcggcggcatccggagccgtgctgcgagtggcgcgtccggttttcggagaaaaactgggcggagtccgcctgccgttgtccgcgacgttggcgcttgccgtggcgttggcgttcagttgaggctcttcgatgtcatttcccgtgacggacggacgggccgatggagcttgacctgactggcgcgaggttcgggcgggggcgaaggagcgtggcacctgcccggaaggccgggtgcgtcgatttcctgcaggaatgaagcttggcgggttgatatgcggatccgccccacctgattcctgcgtcataacccctcctgaaactgtcgattgtctgaatgacactttgacacagcatccgccgggtgttcctgcgctatggtgttcctgcgcaggaacggcacaatatcatgggcaacggcgtcagggcatcgcgttcacgccatagcacacagttccataaaaatgatgtaatgacacgagaaagaatttgacaaaaccgaaattgcatgtgtgtaatttagtccgtatgaaaagctcaataggcaaggagaatcgcatgtggggtgtggtcgacgattcagccgaagagccatggcacgaattgtggggactattccgacctgatggcgatgtatcttggcagcacaaggcgttgtgcgcgcaaaccgatccggaggcgttcttcccggaaaaggggggctcgacccgtgatgccaaacgtgtgtgcgcaaaatgcgaagtgcgtgagcaatgcctgaaatgggccatcgaccatgatgagcgattcggtatttggggtggcatgagcgagcgcgaacgccgtcgatataagcgagagcaccgggagcgggcgtagctccacacacccccttcaagtctggtgcgtacactgggagtttatgagtccgacaggtaatagcgatattcatgaggcgttggccgacgccatgtcttctcgaccatatacgcataggcaggatgtggataccggcattacggctgtgatcaccgttgaggaggatatgcgtttcctccggtctacattgcgttcggtattgacgcagaatgttcttccgggagtcgtcatcatcgccgacgcgactgggcgcaccagttcgaggataaccacctcgttcgaggtcatcccctcgccatcggggccggtgatggaggtgccgcagtccaagcatgtgaccattcacatcgtctcggccaagggcgcacgctccttcggcgatgcggtcagccgggcattggatcgtgccgatctggatgacgctccccgcgcattgtggctgctccatgatgattcccgcccttcggatgcctcatgccttgaacgattgcttgaggcgtggcgcaatacgccgggcgccagtgtgctcgggtgcaaacagtgcgattgggaaggctcccatctgcatgatgtcggtatgtatgcgggtcaccacgccgtgcattccctggtggtcgatggagaacccgatcaggagcagtatgacgggcggcaggatgtgtttgcggtgtcgctggcaggcgcgctggtgtccatgtcgcaattcacgcgactgcggggcatcaatgcctggctgaccacctacagcgaatcggttgatttctgccgccgtgtctgcctgagcggcggacgcgtggtggttgtcccgcaagcggagatatcacatcgccgcgcacggtatgagggcattcgtacgcgaggcggagagccgcttaaggaagatcacacggtcaatcatgcgatgacggtgcatcgctcccaacagcggtatctgtacacggacctggccatgtcgtcctggtttatcgtctggctgtggaggctgctccgcagttttggcatggccatagccatgatgttcggcaagaagccgtatgaagcatgggtgcaattgtgcctgccatggctggccttggccgatatcgcgggaaacatgaaatcacgcagtctggtggccagacaatcgaaggtcgccgcatcgtccctgcatgtcttgttcgcagacagtcagcagatcaagcagttccatgatcgtcgggatgcattccaatcccagcagggcagagtgctgctcagtccgctggaacgtgcccatctgcggacacgcaccatatatcgctggagtgcggccgtggtgatggcgctggtgtgctttgcggccattgcggtgttgtattggccggtgttccgatcgatattctccggcggatcgttgtattccgatgtgttgcttcccaccggtgccagcttcacgcaactggtgcagtccgccaccacgccgtgggtgtttggcagcggcaccggcattcctgcgccgcccacgccgtggctgctggtgctgatgctggcctcgctggtcacgctcggccatgtgaccgccgctttggcgatgatactgtttgtggccgcgccgctgagcgcattgtcgttctgggcgctggcgggcgtattcacccgctcggacgtggttcgtgtgctgggaggactgctgtgggcatccaccggcattatgttcggctggtatgcgcaggccaatatgccgatgcttaccgtaatggtgttcctgccggccgcgttcgcattcgtgttccgtgccgtgggcatgtaccataccgaagacccgctcaagccgcgcacatccgttcaggccgcggccatcgccgcactgtgcttcatccctgtggtggccgccgaaccgcagctgctgttcgcgctgatcgtcgtgttcctgatgttcctgctattcgtgcgtcgcaagcgcgccatgctgttgctaattccggttcctgccgcctttgcggtggctcctacgctcgtcaatgcggtgcgttacgccgatttgggcatgtggcgtcaactgttcggcgacatcacggtgccaacgtcatccgccaatgggtcgccggcgtcgctgagtttgcttgaggccgcacagcgtgcgctgggatggcgaatggggtcgactgattatgccgatttggcggtcactgtgctgtttggcgtcatcacgctgcttgctcttgcttcgctggtgctgccgttcgcgttgcggacctcgcgactgatgtgggtggtaatcgtctgcggaggcgcgctcgccctggtctccagccgtgtggccataaccgtggatgccgatggtgtcgtggccggttccgcgcagccgggcatcgcgatgatgatattgggcttccttgcctgcgtgtgtctcgtcgctggtggggcggtgaagcgattccagccgttgcatgcgtctggcagtgatcccgcaccgaaaaaggaccgtctgcatgtgctcatcgtgtctggccgtgtggtgcttgctctgatactggtgtgctgcattggcatccaatgcatgtatggcatcgaacgtcataaggatgcgggactgggcgtgtctgaaaacggcctgcccatggtcaccaccgattatctggaggccggtgccgatcatcgtgtgcttgccgtgagcgcggagacccgcaacatcgtcaactatgcggtgatgcgcacctcgcgcggcgatctgatcgacagctctccggtccagcgggcgcgcctgctgtccggcaagcatgatgcggttgacgaacaactggcccaggcctgtgcctcgctgctgtccaatcccgacgaagaggccatcgcggccatcagcgcgcttggattcggcggcatctacgtggttcccgagaccggcgattcctcgaacgacatgctgtatgaacagttgagcgcgaatatcgccgcatcgaacggcacccagtccctggtcttcacggatagcggcagctactatcgtctgacgctgcgtagcagcgcctcacagcaggtggatacctcatggcagcaacgtgcacagcatagtgtctggaggcacgcctggctgatatgcctaggtgtgatcacggcgttgtactgcttggtcgccatgcctcgcagacgaccgtcctacggattggaggagcaggcatgagcaacaaaacttctggtttcaaacgtgcgatcggcatcgtgctcggtgtgatcaccatgctggtgttgattgcgctgttcgtcgttctcgtcatggcccccatccccaatatctgggtggataaggtggccgcttccgataatgccatcgaccagaccgttagtccgacccagtccgaaacctactgcccggcacctataggattggccgataccggcacgtacggcgacagcgccttccaggccactgtcggcaatctgagcacacaagcgcgctatgcggcgttcggctccgtctacagcgccactgtctcggcgatcgggcaaaagtccagttcagatgacgtaactttgaaagacgccgattcgaccgacgattcctcggtgaaaaccggtgctcagaagatcaatcagggagctcgtctgatcaatacccgtatgctgcaggccgcagctggcaccggcaccgtcggcaccatcgcatcatgggccgatgatggcgatgtgagaggcatatcggcggcatcctgcgtatcgacctcgctcagccagtcgttcctgctctccgacagcacgaccggtaccacacagcagctcatcgtctcgaatccctccaccaagccgaccaccgtcgacattgccgtctggggttccgagacagccgggaaaatggcattgtccacccaatccacgctgtctgtgccggccgagggggagtcctcgatggaactgtccgccgcggtcgatgggcagcatggtctgttcgtgaccgtttccagcaaggagactcctatcgcgtccgtggtgcgcacggtgaccatggatggtctgacaccgaagggttctgatttcgcgctgccgctgccgaccgcatccaatgcatcggtggcgccgtccatcactgccggcgatgcggtcaccgcttatctgttcgccaaggcagacaccagcaccgggctgtcatggattaccgccaaaggcttggttcccgccaaagatgccaccgtcactgctgataaggtgacggcgatcgacttgggagaagctcctgatggggcgttgggcgtgatgtccaccgcagaggacgccgtgtcgttctccgtcaaggccacacgctccggtgactccggccaagccgatttcgcattggtcaatgccggcgagccatccgaattctcggggttggcccttcccgacggagtaaaggcctccatcacgctggccaatacgtccaatgcgcgcaggacggtcaccttgcgcgcctacgatgatgccggtgcttcggtaacctccaaggaaatcacactggatgcgaacgcagcgcaaacgattgaagccggcaatctttccggcgatcatggcaccgcggtcgtgctgatgttggaggactcatccaagaaagtgagctggggagcgcggttcagtcacgattcgttgcaagacaaggacatcgccggattgtccgtcatcgacgcttcaacgctgatgcccgccacggttcatgtctgggctcggaacgattcctccatcgtcaagtagaagggtatgcttgccgaagcgtcagtttgatgatgtttcggcggcgatatagctgcgggccgtgccactaccttattacaagtgacacggcccgcagtgttgtcacaggccccagtcggggtcgatttcctcgggcctgcgcccatacaattccgctatgcgggccaccagctcatccctgacggccaattgcagttcgagcttggtaggtgcctcggtctgcaacggcatgcggtagagcacgactcgtgcgggaatgccgtggctggcggggaagcactgggacgtcatattcggctcggtctgccaaggcgtcggatccgaaggcggcacatcctccaccgcgaactggagcggacgtatcagttccggccacgcttggccgagcctgcgaacctgggccgccaccatattgtcgaacatgccggtacgagtgcggtaacggggcagacgggtgccgaacatcggggttcgtgtgccgcgaccgtggcggttgcggtagattcgtgcgttccaaggtggctgaagcatggttcccaccatagggcatggcggaggcaacatgcgttaggattggttcattggttgtgaacattcgtcaacgagggaggcacgacaaatggtggtacgttcgtggtccgaacttgatttcgataatgtctgctccaacgccaaggtgttcggtttcgatttggacaacacactggccagctcaaaacagccgatgaagcccgcgatgatcgaacggttctgtgcgttgctcgaccatacggtggtggccctgatctcagggggcggcatggcggtggtcacctcgcaggtgctggatgtactcaccccgaatgccaggcgcggcaatctgcatgtcatgcctacctccggctcccggtattaccggtgggatggcacgcaatgggccttggtgtatgcgcatgatttgtccgaagccaccgtggccgctgtctcggaaagtcttgagcgacatgcccgggaactgggattgtgggaacagcaggtatgggggcctcgaatcgagaacaggggcagccagatcaccttctccgctcttgggcagttcgcgcccgtagcggccaagcaggcatgggatcgcgataacacgaagaaacaggcgctggtcgaagcggtcaaggccgatctgccgcatatgcgggtcagggccggcggatacaccagtgtggatgtcagcgaatgcggcatcgataaggcctatgccgtgcgcaagctgacgcagacacttggcatacgggccgatgaaatggtgttcgtgggtgatcgcatgacgcctacgggtaatgactatcccgcggttgaggccggtgcgatcggtgttcgtgttgagaatccgcaagatacggtacaactgctggatgcactgcttgcgcgattcgatactccagctcgatagtgacgcgttatggacgggccgagcgtatacaagtggtggcatgcgatgtgggcacaggtctgcaatctgctgtttccacgcggctgcgctgggtgtgacgcgccggatgaggtattgtgtgcggcatgctgggccctgttcgcgcaatgccgggaacgggatgcagacagtggtggcggagcccgtatatggtccgcatcgatttatcagggagcggtacgtcgtgccattctcgactggaaggaccacgacgataccgagcttgacggcccgttcggccgcatcatggtgtcgctgctgaacaagacgccaataccatcatcatgcttgggtcatcgcgtattggtggttccggtgccatcatcgcgggcgtcaatgcgccgaagaggacgtgcccatacggcaccgttggccaaatcggtggcaggggcattgcgtgggtgcggcgtcgatgcgcgaccatgcaatgccctgagctcctccaccaaggcacgctccgtgcagcaggtctcttcggcacagcgtgcccgtcgtatcaccggtcatgtcagggtgaagcgtgatctcatcggccatggcgacgcggtgcttctcgttgatgacatcgtcaccacaggtgccaccgtgcggcaatgcgttcaggcgtttcagcaggccggcaccaaggtggtgggcgtgctggtattggcggatgccgtggtgcgacggtccgatgacgatatcaacgggtgaatgacatcggttacgatgccccagatagcaggcgaagcgccgttgctcggcatgtaatcggggtatcgcggattctcggcgtgcaatatggtgatgccggcccgtgaaaccagccgcttgatggcgatttcgtcgtccatgacagccgcaaccacatctccggggactggtgttaacgaacgatcgacaatcagcagatcgccgttgtgaataccggcattgatcatggaatcgccggccatctgcataataaacagcgtggcctcgtgcgccatggcctgtgactcggattgctgtgtcatgctgcgcctcccaccctgtattcgaacatctgttcgaatacagtatacggtaggacgtcggacaatatcagcgttcggcgatgtgaagtttaggcaggatgatttcgaaatcggcacctcgcgtgtcgtcgaccactttgacggtgccaccgtgcaattgggccgcccagcgcgcgatggacaggccaagaccggtgccgcccgactcggtgccgggacccgtcttgcctttgacaaagcgccggaagatgtccaaacggtcggaaggcgcaatctgggagccgaaattcaccacattggtcacgatggtgccttggttttcgtcctcgtgggcgtcgaccagcacggtggtgccgtcggccgaatgtttcagcgcgttggcgatgatgttggtgaatagctggcgcaggcggtcctgatcgccttccatcgtgatgtcggccggcacggtgacgcggatgtcgtgggcgtggccaccatcggcgatttccaacggctcgatggtctcgtcaagaaagtcggcgaagttgaacttttcgatattcagactcgccgcaccggcctccatacggctcaggtccagtaggaaggcgatgagatcggagagacgctgcgtttgggtgaggatgctctccagattggtgggagtgggctcggtgacgccgtcggccatgttctcgaccatcgcctgcaaagcggaaacgggcgtgcgcagctcatggctcacattggcgatcatgtcgcggcgcattttatcggcatgctcgagttcgccggccatctcgttgaacgagcgagccagcttgccgacctcgtcatgacgatcctgatcgatatccacgcggaccgtgtaatcgccatccgccatggcttcggccacatcgcgcatctggcgtaggggagcggtgatgccgcgagagaagaaataggtgatgcccaaggccaccaccaaagtcagcggcatggcgatccaaccggaccagccgaatttcaggaggaaccagcacatggcaaacgcgatggcagtggcgataacgatcagtgcgctgagttccagcttcagagatgagaacaaatcaaccggcttgacgcgaggtttcatcgcatcaagccgggattgctgttgttttttggatgccatcacgcggtcggcggctcgaaagcgtagcccacgccatgcacggtgcggatggtatcggcaccgagcttatggcgcagcgccttgacgtggctgtcgacggtgcgggtgccggatgcgtcgacccagtcccagacctcttcgagcagcttttcgcgggtgagcaccgacttcgggcggcgggccagcgtggccagcagatcgaactcggtgggggtcagatgcacctgttcgccgttcacggtgacgatgcgctgggccgggtcgatgaccatcgaaccgaagtcgagcagcttctcgttctccgagttcttggcgatgaccttcgcacgctccacgcggcgcagcagcgccttgcagcgggcgataagctcgcgcatggagaacggcttggtcatataatcatcggcacccgctcccagaccgatgaccttgtcggcctcgtcatcacgtgcggtgaggatcagcaccggcaccggacgttcggcgacgatgcgtttggtggcctctagaccatccataaccggcagcatgatgtccatgatcaccagatcggggcgtagctgggacgcggcctggacggcggaagcgccgtccccggccacgcgagcggtccatccttcagcggtgatgcgctgggcgatggccgtggcgagcgtgggctcgtcctcgaccaccagcaccgtgcgcggtgtcgtattctgacgcgctgtggtattgagcataaataaaccggttacctttcagcctgttgaccagttcagtcttccggcttcaagaatacaactcccagagccggaacggtgatcttcgccgagaacggacgtgaatgatattcgccctcgaccgcttcgaaggtgccgttgtggatgtcggagccgccgtacttggcgtcatcggtggtgaacacttcggtccacttgccgccggtgggcagcgccacctggtaatcggaccaggcctcaccggagaagttgaccaccacagccaaggtctcgcccttggtaccgatgcgcaggaagctcagagtgttgtggtcggcatcgtcgctggtcagccactggaagccggccgggtcgaagtcctggctccatagtgccggatgcgccttgtagaaggcgttaaggtcggcgaccatggtctggacctgacggtgctcctgccagttcaggcaatcccaatcgatggaggcgtcgtgatcccactcgccccactgggccagctcgttgcccatgaaggagagcttcttgcccgggtgagcccactgataggcgaacatcgaacgcacgccggccagcttctgccagtcatcgcccggcatcttgccgtacagggagcccttgccgtacacgacttcgtcgtggctgatgggcaatacgtaatgttcggagtaggcgtacaccatggagaaggtgatctcgttgtggtgccacttgcggttgatgggctcctcgtgcagatactcgagggtgtcgtgcatccagcccatgttccacttcatgccgaagccgatgccgccggcggaagtgggggcggtgatgcccggccatgcggtggactcctcggcgatcaccatgacgccggggttgttcttgtacgcggtggcggtggcctccttgaggaagtcgatggcctccaggttctcgcgtccgccgtagatgttcgggcgccaatggccgggttcgcggctgtagtcgaggtagagcatggagctgacggcatccacgcgcagtgcatcgacgtgcaggtcctcaagccagaacagggcgttggccaccaggaagttgcgtacttcgcggcgtccgaagttgaacacataggtgccccattcagggtgttcgccgcgcagcgggtccgggtcctcgtacagcggggtgccgtcgaagcggccgagcgcgaaggcgtccttcgggaagtgggcgggcacccagtccatgatcacgccgatgccggcctgatggaactggtcgaccaggtaacggaagtcgtcgggggaaccgagacgggagtcgaccgcatagtagccggtgacctgatagccccaggagccggagaacgggtgctgggccagtggcatgaactccacgtgggtgaagccttcctgcttgacgtagtccacgagctgcttggccaggtcgcggtaggtcagtccctgcctccagctgccggcgtgcacctcatagatggagaccgggccatcatgcgggttggtggtgcggcggtgctgcatccaggcgtcatcgttccacttgtaggtggattcggtgacgatggaggcggtgttcggcggaacttcgtgctgacgctccatcgggtcagccttcatctcccacgtgtaattggcgttcaggatctggaacttgtaggtctcgcccgcgccgattccggggatgaagatctcccacacgccggaggagccgagctcgcgcatggcatgacggcggccatcccaagcgttgaagttaccgactacgcgcacggcatgggcgttcggggcccacacggagaatgcggtgcctaccacctgttcgccgggcgtgccgtctgcgccgcccatcggatcgtcatagcgcagcacatgcgcgccaagcgtctcccagagcttctcgtgacggccctcgccgaacagataggtgtccatgtcgccgactgtgggcatatagcgatatgggtcgtcctcaatgagcactgcgccgctttcccactcggtcctgacacggtagtcgggaatcgtgggctgcttcttagtgccggaagccggcacggtaaccacgaacacgccgttgtattcgtgggtcatcgggtattcgccatcctgggtgaggatggtcacggacttggcaagcggacgcagcacgcggattgtggcggtgtcggcatgcttgccgatgccgagatgcccgccgagaactccgtgggggttgtagaattcagcattgctcgtcgcatcgaggtcgccttgggcgacaggcacggtgacggtatcttccttgatcttcgtttctttagccatgtcccaaagtctacgtgcgttgaagtcgaaaacgctacattggcgcgtcgaaaatggcgaattcttgcccttttcgttgtgtttccgtggttgtgagcgctctcataggggtggtccagaccgcatggcataattattcgagttttcgtgtgtaagccgtcagttctcggagggtacatgtcttacaaagtcggcgatatggtcgtctatccgcgtcatggtgcagcgaaggtggaggccattaccgagcggacggtcaagggagtgacgcgcgaatatctgcagttgtccgtactctcttccgatggtttggtcatcaacgttcccgtggacaatgccaagaaggtcggtgtgcgtgacatcgtctccgcatccgaagtggccaaggtgttcggcatcctgcggaccccgatcatcgagaaagagatgaactggtctcgccgttacaagctgaacgtcgaaaagatcgccaccggcgatgtcaacaagatcgccgaagtggttcgcgatctcgcccagcgcgatgtcgacgagcacggcctgtccgcgggcgagaagcgcatgctcaccaaggcccgtgccattctgacttctgagatcgccttgtccgagaagatcgacgaggcggaagcccagcgtctgctcgacgtgaatctgggctacgagcccgctcagcccggtgacgacaagcatcacaccgccgagcccgaagaggccgcggccgatactttggctcgtgttgaagccgagaagaagtccaagaagaagtgatttgattgttttgaggccccggtcgtgtccttatgcgatgcgccggggcttcgtgattcataatcgtttgctgccgttcgtctgggcaacgccatcgaaggggactgcatggggtctgtaggagtgctgatagggcaaggttttgacgctcaccgttttgcgcctgctggctcaggccgtgaactgtggattgccgggctctactggccggtgcctgattcatgcagcgaggccgatgccgccaaatacgagggtatcgaaggcgattccgatggcgatgtggccgcgcacgctctgattgacgcgttgcttgccgccgcccgattgggagacattggttcactgttcggtgtcggtgcggacgcgcatggtgccggaatgcatggcatcgatatgttgcaagaagttgtggcgcatctggcatccaacgggtatacgccggcatcggcctcggtggcgatcatcggcaaccgcccgaaaatcggcacacgccgtgctgaagccgaagccgccctgtctgcggcggttggttgcccggtatcggttaccgccaccaccaccgaccatatgggattcactggccacggcgaaggcatcgccgccatcgccaatgccttggtggagaagatataacaaagcccccgctatgaattcgccagcgggggcaagaaaaaatggatgagattacttccgcatcgtcttcacggctttggcgatagcccagaacagggtggaaagcgtcacgatgatgaagctcgggggagcggggaacatcgccgacagcacgagtccggcccaaatcgacaccaagcacagcacgctggcgatcaccattgccttgaatggggagccggccagaatattggcggtggccgcgggcgtaatcaccagtgcgaaaatcagcaaggtgcccactgccggcacggcgatggtgatcacaccggccataatcgccataaacgccacgttcatcagcccgatcggcacacccttggcctgtgccacctgctcatccagcgagctgaacagcagcgggcggtagatgatggccaacaatgccagcagcagtacgtcgaacacggcgaagccgatgatctggccggtggtgatggtcaggatcgagccgaagaggatcgactgcatctgctgggaggcggaactcgacaatcgcgcgaagaacagacccaagccggtggcgaaggccagcacggtgccggtggcgatttcacgctcggaaacgcgcttgcccaaagcaccgatcaccagtgcgccgcccagtgcgaacacgcccatgcccagtgacacgggcaggccgagcaacaccgcgccggtcgcgcccggcagaccgatatgggccagcgcatgggccgcgaaggtggaacgacgggcgatggtgaagtatcccatgacaccggcggccagggcaatgcacaggccggcgatgaaggcgttggtcatgaatggagcggacagtgtatccagccattcgggatcatacgaaaagttgatggtgctcatgtctctgtattttctccatgcctgagctacagtccgttgatgggctgtgggtcggctcgcttgatgttatcgattctcggcgctgttggcggtactgccattggtggcattgccgtgctcgtgatggtgcaattgcgccacttcggctgccgtgtgcatatcctgcggctggtcctggagctcatccggcgtcggggtcacgaacatgtctccctgcggagtggtgaccacctgcacctgtgtgccgtagaggtgggtgagtaggtcggagtcgagcactttgtgcatatcggcgtagtgcgggtgaccgtcgagcaagtagacggcaccggtcagaatcggcaagagcatattgagatcgtgcgcaaccacctggatggtcatgttcagttcacggttcagcttggccagcacgtgtacggtggcgcgctgactggccagatcgaggttggccaacggctcgtcaagcatcagcagttgtgggtcgcacaccaacgcctgggcgatggccacacgctggcgcaaaccgccggacagttcggacagacggtaccgcgccttgtcggcgatgccggtgaactccatcgcctcgagcgctttggctttctgggccttggtgatggggtggatgccgaatcgggtgccggtcaggcccagcaacacggattgttcggcggtgagattggaatcgacattcgccacatagctctgcggcacatatccgatgcgtttgttcatctcgcctgcgggcttgcccagcacggtcaggctgccatgacagagcggcaaaaggcccagctcggccctcatcatcgtggttttgccggtgccgttggtgccgacgatggccgtgaccgaaccggtgggaatggcgaaggtgccatgctgccagatgatatggtcgccacgcttgatggcggcatcgctgaacacgatgcaatcggaagtttcactcataacgcccgattgtggcaaacgatgctgacaatcgttctcaatatcgtgtacggatggtgataaccaaagagaagggttgtgcggccatctcgacaatggtcgcacaacccttctcatgcaaggcgtctattggcattggcacgaatccgatgccggtgtcctttgcttctaactatttgccggagtcggtctggtcgttgccggaggcatcgccggaatcgccattggcggcatcggcctttgccgaatcctgagatgagtcactggatgcggccgccttgcactgacggatgtacttggggtccgtgctggaaccggtgctggccttggagtcttgcgcattggcatcatccgtggcggagccttcggcgctggaatcatcggaattcgcgttgctgtccgcggtatcgccgtccgtggcgtcttcacagccatagcttggatccaccgcgtcgatgatggtgttgatgagctggttgatccaggcgttcagcgtgtcggcgtccttgggcatttgttcggagacgtcgactaccggcacatcggcgcgaccggcagcgccagtgatcatattggtcgcgtcactggcttcctgcgtgttgttgaccagcacatccacgcccttgtcttcgatgagtttctggaaagactgcaggtccgcgggtgccggttcgccgccggaagcggtcgattgcgtataccccttgggcgtctgatctttgaacccaagatcggccatcagataatagaccacgggttcggtggctgcataggtgaggttggagtgggacttggtgaactcggacgcccatgtttccaacgatttctcgtccgcctgccatgccttgagccgcttctggaaggctttcttcttgctggggagtgcctttatatatgcatcggtgatggccgtggccatgctggatcgagcgtctttggagaaccacagatgcgggttatcgccctcgacggcacccatgacggaagcggcggatacgatattcgtggtcttggtcatcgatttggtggcccaggaatcgtagcccgcaccgttggccacgatgatttgggccttggacagcttggcgacatccgaggtctttggctcgaaatcgtgggcatccacattggtggagttcacgatggacgtgacttccacatcatcgccgcccagctcggcggccagcgagccccattgattgagggaggccaccacattgatcggcccggtcggtgcgggaacgctggtcttgttgtccggctcggtttcagcgggggaggtggctgcgcatgcggtggtcgcgaacaacaggacggcgctcaggccggctgcggcgagtcgcgtaagtcgtgtgatttgagtccccatggcacgccttcttcgtgagagcgaacgatatataatcctgacttgttccaacgatagcctatcgtttcgatagaatgcaccgaaactacaggggagggcgttgatgtccacaaaaatcgacggtaagcagattgcggccgaaatcaagaccaaccttgccgagcgagtgaacaagctcaaggcgcagggcatccaaccggggctgggcacgctgctggtgggcgaggaccccgggtcgatgaagtacgtggccggcaagcacgccgattgccaggaagtgggcattacctcagtcaagaaggaactgccggcggacgccagcttcgacgacatcgccgctgccgtacgcgaactcaacgaagatccggcttgcaccgggttcatcgtccagctgccgttgcccaagggcatcaacgagaacgcgatcatcgacatgatcgacccggccaaggatgccgacggcatgcacccgtacaacctcggcgaactggtgctgcatgtgcgcggcgacatttcgacgccgctgccttgcactccgcgcggtgtgctcgagctactcgacgcctatgacattgatctgaacggcaaggaagtgtgcgtgcttggccgcggcatcaccattggccgcacgattggcctaatgctcacgcgcaacgccgtcaacgccaccgtcaccctgtgccacaccggtacccgggatgtggccgaccacatgcgccgcgccgacgtgatcgtcgccgcaatgggttcggccggattcgtgacgcccgacaaaatcaaggacggcgccgtgctggtcgatgtgggcgtcagccgcgtctacgacgaagaagccggtcgctaccgcatcaagggcgacgtggacaaggcctgctacgacaaggcctccgcctacacccccaaccccggaggcgtgggtcccatgacccgagccatgctcctagccaacgtcgtggaaatggccgaacgacacgcctagagtttcctaggaaatttgggcagagttgcttgtattgtgaatatctgtatgcctgtagggtgtgcgtataactgaatatcgagaaattatccatccactattagaaaccatatatttacatggcagagaacaacactgaagtcaccaaggttgccatcaacgacatcggcaccgaagaggacttcatcaaggcagtcgattccaccatcaagaacttcgatgatggtgatctggttgagggcaccgtcgtcaagatcgatcacgacgaagtcctcctggacatcggctacaagaccgagggtgtcatcccctcccgcgagctttccatcaagaaggacgttgatcctgacgaagtcgtcgaggtcggcgacaccatcgaggcccttgtcgtcaccaaggaagacaaggaaggccgtctgattctgtccaagaagcgtgcccagtacgagcgcgcctggggcgacatcgagaagatcaaggaagctgacggcgtcgttgagggcaccgtcatcgaagccgtcaagggcggcctcatcgtcgacatcggtctgcgtggcttcctgcctgcctccctcgttgagatgcgtcgcgtccgcgacctctccccgtacatcggccagaagatcaaggccaagatccttgagctcgacaagaaccgcaacaacgtggtcctgtcccgtcgccagtacctcgaggagacccagtccgaggtccgcgagaccttcctgtcccagctcaagaagggccagatccgtgagggcgtggtgtcctccatcgttaacttcggtgctttcgtcgatctcggcggtgttgatggcctgatccacgtttccgagctgtcctggaagcacatcgaccacccgtctgaggtcgtcaaggtcggcgacaaggtcaccgtcgaggtgctcgacgtcgatctcgaccgtgagcgtatctccctgtccctgaaggcgactcaggaggatccgtggcagcgcttcgctcgcacccacgttcccggccagatcgtcaagggcaaggtcaccaagatcgtccagttcggtgtcttcatctccgtcgaggacggcatcgagggcctggtgcacatctccgagctcgccaaccgtcacgtcgagaacccggagaccgtggtcaagccgggcgagaccgtgttcgtcaaggtgatcgacgtcgacctcgatcgtcgccgcatctccctgtccctcaagcaggccaacgactccgttgacccggcttccgaggacttcgatccggccatctacggcatgccggccgagtacgacgagcagggcaactacaagtaccccgaaggcttcgacccgaacaccaacgagtggatcgctggttacgagaagcagcgcgaggagtgggagtctcagtacgccgccgctcacgagctgtgggaggagcacaaggagttcgtggccaaggagctggagaacgctgccgaatccgcagccgccgacggccagggcccgaaggaagagaagccggtcgaggagacctccaactactcttccgctgctccgactaccggtaccctcgccgactccgatcagctcgccgccctgcgcgaccagctgctcggcaagtgagtttgccgcgaagctagcgcttagcgtttaacggaaacccggtccgattgggccgggtttcttgtgtttttggagttatccgccaatgactcacctcagtctcgctacgcgagccggatcccctccctgaggggagctgtcggcgataaccggccgaggggagcgccagctatcatgggcaccatgatgcgaataggactgaccggcggcatcgccgcgggcaaaagtacggtggcggcgcgactcaagcaactcggcgcgttgcatatcgactacgatgcgctggcgcatcagatcgtcgaacccgggggagtggcgctgccacagatcgtcgccgagttcggtcctgatgcattgctcgccgatggcactatgaaccggccatggattgccgatcatgtcttcggcgcgaacgccgcgccgggcgcacgtgaacggctcgacgccatcgagcacccattgatctatgccgaggcggcgcgactggagcatgagcaccccgaggcagccatcatcattcacgacattccactgctcgccgaggtcattgacgatattccattcgcctttgaccatatcgtcacggtcgaagctcccgtgtgcatgcggctcgaccgtatggtcgaggaacgcggcatgagcctggaacaggccgaggcccgcatccgccaccaatccagtgaggaggagcggcgggccatagccgatatcgtcatcgactccacccatccattgcccgagatgctggcccaagtgggtgagatatacgcaggatggtgcgcaggtcgctaagatgaggccctatgggattcaatatcgagcgcgcggacaagcctttcgtcgtcaaatcgccatataagccatccggcgaccagccgcaggccatcgccgaactggccgaacgcgtcgaaaacggcgagaatgatgtggttcttatgggtgccaccggtaccggcaaaaccgcaaccaccgcctggctgatcgaaaagctgcagcgaccgaccctgattatcgagcccaacaagacgctcgctgcgcagctatgcgccgaattccgcgaactcatgccggacaacgccgtgagctacttcgtgagctactacgactactaccagcccgaggcatacatcccgcagaccgacacttatatagaaaaggactccaacatcaacgacgatgtggagcgcctgcgccaccaagccaccgcaaacctgctgacccgccgcgactgcgtggttgtggccaccgtctcctgcatctacggcttgggcacgccggaagaatacgccggtcgcatgctcttcctcaaagtcgggcaggaaatcaaccgcgacgacctgctgcgccaattcgtggccatgcagtacaagcgcaacgacattgccttcacgcgcggcaccttccgcgtgcgcggcgatacggtcgaaatcatccccgtctacgaggaactggccgtgcgcatcgaattcttcggcgacgagatcgaccgcatctccacgctgcacccgctgaccggcgacgagatcgacgaggaaaacgaagtccacatcttcccggcctctcattatgtggccggccccgaacgcatggaacgggcgctcaaaaccattcgcgaggaactcgaagaacgcctggcagaactgcgcaaacaaggcaaggagctggaagcgcagcgcctcaacatgcgcaccacctacgatctggaaatgctcacccaagttggcgtgtgctcaggcgtcgaaaactattcgcgccacttcgacggccgcgccgccggcaccccgccgcacacgctgctcgacttcttccctgacgacttcctgctggtcatcgacgaatcacacgtcactgtgccgcaaatcggtgccatgtacgagggcgatgcctcccgcaagcgcacgctggtcgaacacggcttccgtctgccctccgcgatggacaaccgaccactcaaatggccggaattcctgcagcgcgtcggccagaccgtgtacctgtccgccacgccaggcgactatgagatgggactgtccgatggggtggtcgaacagattatccgcccaaccggtctgctggacccgaagatcgacgtacgcccggtcaaggggcagattgacgatctgctcgccgagatcaaggcccgtgtggccaagaacgagcgcgcgctggtcaccactctgaccaagaagatggccgaggacttgaccgactatctgctggaacgcggcatcaaggtcgaatacctgcattccgatgtggatacgttgcgccgcgtcgaactgctgcgcatgttgcgcgaaggcaagatcgatgtgattgtcggtatcaacctgctgcgtgagggcctcgatttgccggaagtatcgctggtggcgattcttgacgccgacaaggaaggattcctgcgctcctatcgttcgcttatccagaccatcggccgtgcggcccgaaacgtgtccggcacggtgatcatgtacgccgacgagaccaccgaagccatgcggcaagccatcgacgagactgaccgtcgccgcgccaagcagattgcctacaaccaggagcatggcatcgatcccaagcccctgatcaagaagatcagcgacgtcaacgacatgctcgccaaggaggatgtggacacccagaccttgcttgaaggtggctaccgcaacgcaggcaaggccggcaacacgcacctgggcgtgccggtactcgatcccaacgaggcagacaaacgccacgaggagatcctgaaggccggcctgcccgcgcaggacctcgccgacctgattcgccaactgagcgaacagatgcacaccgccgccgaacaactccagttcgaactcgcggcccgtctgcgcgacgagatccgagacctcaaaaaagaactccgtcaaatgacggaagccaacaagtaaccaaattcccatacccgaggcgggcagtcaggggatgcgttgtcgaccgtaaagacttggcctgagcggcccggagcgtgtcgaacaacacatcccctgactgcctggcgatcagcgctaccggaacggccccaaaaccgtcacatacataagttagtgtagggaatcatggcagaaaccccactcgcatttgaaatcatcaccttcgtggtgctcgcgttgttctttatcgtcgacctgttcgtcatcgggcgccgaccgcatgtgccctccaccaaggaatgcgtgcagcatatcgccttcttcgtggttatggcgctgatcttcggcggatgcatctggttcttcgccggctccaagcccgccatcgagttctattccggctggctcaccgaatactcgttgtccatcgacaacctattcgtgttcgtcattatcatgtcgaacttcgcggtgcccaagcagattcagaagtatgtgctgtccatcggcatcaccattgctttgattttccgtggcattttcattctgatcggcgcggccctgatctcccgcttcacgtgggtgttcttcctgttcggtgccttcctgatctacaccgccgtcaaactggtgctcggcggcgatgaagatgaggaatatcacgagaacggcatcatccgtaatctgcgcaagatcatcaagattaccgacgactacgacggcgagaagctgcgcaccaccaagaacggcgtgcgttactggaccccgatgctcatcgtgttcctgaccatcggcaccaccgacgtcatgttcgctttcgactcgattcccgcgatcttcggcctgaccaaggatccgttcctggtgttcacctccaacgtgttcgcactgctcggcctgcagcagctgtacttcctgctgggtgctctgctcgacaagctcgtctacctgcctgccggcctgtccgtggtgctgggcttcatcggcgtcaagctcatcatggaggccctgcacggcaataccttgccgttcatcaacggcggcgaaggcgtccattgggtgccggaggtgcccacatggctgtcgctggctgtgattgtgctcgcaattggcggcgcatccgtggcttccgtgatcaagatgaagagcatggaaagcgctgaaaaggcctgaaatcgttagagaatacaacccttaaatccagtcaacacaacaatgtgagcgctcacaacacaccgtgaagaaaacttgtcatgagtcggctcgcgctagtagactgggttccggcaaatggggcaatcgcgcctcgaaccaaattgaacaagaataggcaggcattcatgcgtaaagccaagatcgtagacaccatcggtccttccaccgaggattacgacaacctcctgaagctcgttgaagctggtatggacgttgctcgtctgaaccgctcccacggcacccccgaggatcacctcaaggtctacaacaacgtgcgcaaggccagcgaagccactggtcgcaacgttgccgcgctcgttgatttgcagggcccgaagattcgctgcggttggttcaagaagaacgccgatggcgaagacaaggttcagctgcagctcggccaggaattcgtcatcaccactgatgacgtcgagggcgacgagcacatcacctccaccaccttcaagggcctgccgggcgattgccacccgggcgacccgatcctgatcgacgacggcaaggtccgtcttgaggtcaccaaggtcgagggcaacaacgtgtacaccaaggtcgtcgtggccggtcctgtgtcctcccacaagggcatcaacctgccgggcgtcgccgtctccctgccggctctgaccgagaaggatgaggccgacctgcgttgggccatccgcaccggtgccgacgtcatcgccatgtccttcgtgcgtttcgccaccgacatcgaccgcgcccacgagatcatggacgaggaaggccgtcgcatcccgatcatcgccaagatcgagaagccgcaggctctggagaacctcgaagagatcgtcaagaccttcgacggcgtcatggccgcccgtggcgacatggccgttgagtgcccgctggaagaggtcccgctggccactaagcgcatcatcgagctggctcgccagtacgccaagccggtcatcgtggctaccgaagtcctcggctccatggtgaactccccggttccgactcgtgcagaggcttccgactgcgccaacgccatcctcgacggctccgacgccaccatgacctccaacgagaccgccgttggtaagtacccggatgtgaccgtggccaccatggcccgtatctccggctacgccaccgaccacggcttcgaccgtatcccggagctcaagaaccttgacatgtcctccaccggcgctgtctcctccgccgctgtggacctggccgacaagctcaacgccaaggccatcgttgcttacacccagaccggtgccaccgtgcaccgcgtctcccgtgagcgtccggccgccccgatctacggcctgaccagcaacgagcacacctaccactggctggctctgtcctggggcaccgaagccttcctgctcaaggaggactaccacgacaagtcccgcaaggatctcatggtctacacggacaaggtcctcaaggatgctggcaaggttgctgacggcgacaagatcgtcatcctgagctctgctcagggcgatcaccagccgggccgcactgactccatctacgtgcacaccgttggcgcttgcgactgatttgaggcttctggtagctgctgacagctagcatatagcacacgaaagcccccatccactttggatgggggctttcgttatctgttatgttgcgattgtgtggtgattgcaatggcccacagtcaccgcggtgatcgagcgtggcgatcagtcgttgagatgatcgagcgtgccgctcttcagacgcaaaatggcgaccatggtcttggcatccacaatcgtgccattgaccaccatctcataagcatcgtccaccgacaccatacgcacgtcggaacgcggagtctccgggccgatttcctgacgggaagccggggttagaccggtggcgaagaagattgcggtgtgctgggtggaatagctcggcgtgttcataaaacgggtgaactacgtaagcttggtggcgtcgaagccggcctcttcggccagcttgcgcttagctacatcggtcgggcgttcggacgggttgttggcgtgaccggccggaatctccaacgtccaacgatggttggcgatgcgatactgctcgaccagcggaatcatgccatcatcggtgacggccagcacagccacagtgtcgccattgttctcctgaacaaagtagcgttcaaacgaaccgatttgattcgactcataggagacgtgatcgacattgaaataatgcgtctccacaatctgtctacgggaaatctccttgaccggagaggggcgccagggatcgaactgacggtaagtttcgttgctcataagccctcctaacaaaagcgatacatcgaaactacagcccattgtaagcggtgaaaccacgcaggagaacgggcaacacacgggtacgccgtccgcgatatcgacgtgtttcgcctgttttaccggggggaatggaggattggcgcgtgtcttgtgtcgcaagagtcgaattggtatgctactctcttcagagtgctttggcacgccctcgtatcccaattggtagaggaagcagcctcaaaatctgcgcagtgtgggttcgagtcccaccgagggcactttagttaggagttcgctgaaattattgcgaaccccattgttgggtaattcaagaaagaggttggcatggctgcaaggaagaagtccgaagaaccgagtatcaacatcgatgaggtgctgaccgacgaagagctcaaggccgtggccaatgaaagcgaacctgctgagcgcaaggccaagtccgaggacggtccgcgtaccgttgtcgtggccgaggacgaagccgtgaaccgcatggatctggtcgccatgctggaagacaacggttatgaggtcgttggtcaggccgccaacggcgaggaagccgtggaactgacccgcaagtaccgccctgatgtggtgtgcatggatgtcaagatgccgcgtatggacggcatcaccgctgccggcattatctgcgatgaaaacatcgcccccgtcgtcatgctcaccgcattctcccagaccgatctggtgaagaaggccaccggcgctggcgccatggcatacgtcaccaagccgtacgaggaatccaagttgctgccgaccctcgaggtggccatgggccgtttcgccgagatcaacgatttgctggacaacgtggagcgcagcgaacgcaagctcaaggaaaccaccgaccagctcagggaaaccgaagagaagctcaagaaggccgaagacacgcttgaggagcgcaagctcgtcgaccgcgccaagggtctgctgatggacaaggcggacttctccgagcagggtgccttccgttggattcagaagacctccatggaccagcgcatccccaagaagcgcctggctcaggccatcatcgccaagtacggcgatccgaagccttctgattcgggcgaacgctgattatcggcgtcgccgtaccgagtcgtaaagcaacacaaacacactatgggagaggccagcgtgaccgtacccaccaatgaaacattgctggtggtggacggccactcgctggccttccgtgcatttttcgccctgccggtcgacaacttcagcacctccagcggccaagccaccaacgccgtctggggttttgccaccatgctcgcgcaggtgatcgacgcggagaagcccgaccatctgggcgtcgccttcgatgtgaagggcggcacattccgcaatgagatgcttccgcaatacaaaggcacccgtgaggcggctcccgaagagctgctcacccagctgccattgattcaacgcatgctcacggccctcggcgtcacctacatcgagaagccgggattcgagggcgacgacgtgatcgccaccctcgccaccatgggagacaaggccggttaccacacactggtattgtccggtgaccgagacgctttccagctggtggatgacaacgtcaccgtgttgtacccgggccatcacttcaaagacctgaagcatatgacgccgcagtccatcatcgacaaatacaaagtcactcccgcacaatatccggatctggcggcactccgaggcgaaaccgccgacaatattcccggtgtgcccggcgtaggcgacggctttgcggccaagtggatcaaccaattcggttccctcgacggcatttgcgagcacgccgatgaaatcggcggcaaaaaaggcgaatcactgcgggccaatatcgaccaggtcaaactcaatcgcaaagtcaacgcactggtacgagacgtcgatctaggcgtcgatatcgaggatctgacattcggcaccgtggacgtggcgcagatcgacgccctgttcaaggagcttgaattcggacctcgcaccaagagtcgtgtactgaaaaccttcaataccggggccaaggcatccaacacatccggagccggcgagtccacgaataatgagcagaacgagcaggatagcagcctcgatctgaacctgccggaacccacgagcatcactgctccggagcagttcgacgaatgggtcaaggcccatcgcgtcgaagtcaaggttcccggtgaaatcgccgatttcacggtttccgactatggcgatggctcgcggcggcatgccgtctgcggcgacgcggtcggccacgcttggaccgtggccgcatggggcgacgaaaggccggggcgtgccacggcacaagccattgccgttgccacggcaacatcagcggccatagtgtcccttccaatcaccgataccctgcgagcacagcttgcgcagttcctgaaaagcgaacactcccgcaccatcgtgcatgggtataaagaattgctgcatcttttgggcgcggtcgatcttgacatggacctgccgatgttcgacaccaagcttgccgggtatctggcccaaccggatttccacgccgatagcctcaaacaggcggccgagcacttcctcgacatccacttcaccgaaaccgaacagccttcgcaaggcacattggacttcgacgacgatcaggtcgaagaagatccgaacgaacatcgtctgcgcgatttggccattatccgcagcctcgccgtcacgctcgggccgattatcgacgagcgtgaacaatgctggctgatgcgcgcgattgaacttcctgtttcccgcgtgctgcacggcatggagcgcacaggagccaaagtcgatagcgttcgactcgtttccatgcgtgaccagtttgccgccgaggctcgccaagcgcaggaaatggcttgggagtatgccggcaccgaaatcaacctgcaaagccccaagcagctgcagaaggtgctgttcgaagatatgggtttgaaacccaccaaacgcaccaagtccggctcatacaccacgaatgcggccgcattgcaggatctgtatgtcaaatcagtggacaatgagcgggccaacggtttcctcggagcgttgctgcgccatcgcgagatcaacaagctcaagcagatcgtccaaacgctgatcgatgccaccaacacatcagatgagcgcatccacaccactttcgagcaaaccgttgccgccaccggccgattgagctccgtggatccgaacctgcagaacatccccaatcggaacgccgccggccgtgagattcgtggcgtgttcgtgccgggggaggggtacgaggccctgatgagctgcgattactcacaggtcgagctgcgcattatggctgatctgtccgatgatgaggcgctgatcgaagcgttccgctccggagccgacttccacaaatacgtggcctcgatggtctacaagctgccggtcgaccagatcaccggcgaccagcgcagccacgtaaaagccatgagctacggattggcctatggtctgagcacgtatggtcttgcccagcaactcaagatcgcgccacgtgaagcggaagcgttgaaaaaccggtatttcgatacctttggcaaggtgcacgattaccttgaatcgctggtggccaatgcccgagagaaggggtatacggaaaccattttcggacgacgtcgctacttcccggccctgcattcgaccaatcgtgttgcgcgtgaggccgctgaacgtgcggcactcaacgcaccgattcagggatctgccgccgacatcatgaagattgcgatgattcgcgccgagcagaccttggccgaggctcacgtcaagagccgtatcattctgcagattcacgatgaactggtagtggaaatcgcgccgggagaaggcgaccaggtcaccgaactggtgcgcaacgccatggaacacgccgtcgaccttgccgtgccgctggacgtatcgtgcggcatcggttccgactggcaactcgctgcacactgacaatttctagctcccctcgggtgagggggctgagccgttgagcaaacagtccagtggattgtttgtaggcgaaggcgagccgatagtcgagcaatgaagagcacgagcatggcttgtccgcaattgcagaatgagtcccttgccgcaatagcccactacaatgggacatatgccgaatctcaagcaagtcatcgacgttctcgagaccctgtacccattgcgctacgccgaggaatgggatgagccgggcctcattgtcggcgatctgagccacgacgtgcaccgcatcgtgttcgccgccgacccgacctccgccatcattgacaaggctatcgctactggcgcggacctgctcatcacccatcacccgttgttcttccgttccgtacacgagacgagcggactcggtttccggggcgacatcgtccgcagactctaccagcacggctgcgggctgtgggtagggcacactaatgccgacgctgcgtatcgcggcgtgggacaggcggcggccgactacttcggactcatcgaccagaaaccactcgtgccgattgacgatgcaaacgcctctcatccggtcggcttggggcgtgtgggtcgtttgccgaagcctgttgccctgaaggatttcgctcagcgagtattcgacgaagtgtccgatcatggcatgaccaccgcgctcggcatccaggtatgcggcgattcggacacttttgttcagtatgtggccattctgcctggctccggggactccctgttcaacgaggtgcgtgccaccggtgtggacgtgtacgtaaccagcgatttgcgtcaccacccggtgaccgacgccatcgaacaagcccggtatgaagcccgtatgagggcccaaggcatcatgctcggccatggaatggcgggggagagccatgtgcgtccctgcttcatcaacacccctcatgccgccatcgaatccatgtggttcaactacgcgatcgatgacgtgccagccgccatcgaacaagcgaccggagcaaggcctgaagtcgagtggttccacgacacgaccgatccatggacgctgtccattaccgcgcatcgagattaagacgctatagtaacgtggcaaaaacgttttttccgaggagatgacatgtttggcggaagcaagcaggaacaactggagcatcggctcgaccataagctgaacgcctcctcggacggcatcgacatggacgtgcccgccaaagtgatcagtagcgaaaccgtttataccgggcgcatcttccacgtggacgacatgcgcatcgctctgaccgacaagcagggcaaggaacatgagatcggccgccaggtgctgcgtcacgccccctgtgtggtcatgctcgtgcacgacatgtccaccgaccgttacctcatcgaacgcgaataccgtgccggatcggacatgttcgcctacgggcttcccgccggactgatggacgagggcgaggacatcatggacgcggccctgagggaactggccgaggaaaccggcgtggtgccggaccgtgacaccatgggcgttgacttcgtaggtgatttctactcgtccgaaggcatgaccgacgaactggcccacatcatggtgttgcatttgggcccgttcaggcgggagcagcgccatttcgatgcggacgagcatgtggaatccgcgtggattccgtggagcgaccttgccgccacgcgcatcacctcatccaattcgatgatcgccatccagcatgaggcgttacgcagactcatcgccaggaactccgacaaggataagccgtcgctgttctcctgacgttcaactccccggcacatcactgacacaaaaaaagtgggatactgaaaactatgcagatcagacctggatcaatgtatccgctgggcgccagctatgacggcgccggtgtgaacttcgcgctgtactcacaggttgcgcagaaagtcgagctatgcctgttcgacgagcacgatgtggaaacacgcatcgaaatgaccgaacggaactcgtacgtatggcataactacattcccggcctccagcctggccagcgttacggctaccgcgtctacggtccctatgacccggtgcacggcctcagatgcaaccccaacaaactgctgcttgacccgtatgccaaggccattgaaggtaatatcgacggcgacgaaagcctgttctcatactggttcaagagcccggacgacaactcggcgatgaacgaccttgactcggccgcccacaccatgaagtcggccgtcatcaacccctacttcgattggggcaacgaccagcatccgtacatctcgtaccacgattcggtgatctacgaggcgcacgtgcgcggcatgaccaacctcaacatggacgtgccgccggacatccgcggcacctacgccggcctggcctatccgagcgtcatcgaatacctgaagaagctcggcatcaccgccatcgaactcatgccgatccaccagttcgtcaacgactccttcctgcaggagaagggcctgtcgaactactggggctacaacaccatcggcttcttcgcaccgcacaacgcctactcctcctccggggaacgcggcgagcaggtcaacgaattcaagtccatggtcaaggcctaccatcgcgccggcatggaagtcatcctcgacgtggtgtacaaccacaccgccgaaggcaaccatatgggccccaccctgagcttcaagggcatcgacaacgcctcctactaccgactggtggaaggcgaccagcagcactacttcgacaccaccggcactggcaactcgctgctcatgcgctcgccgcacgcgctgcagttgattaccgattcgctgcgctactgggttactgaaatgcacgtcgacggcttccgcttcgatctggccgccacgctggcacgccagttccaggaggtcgacaagctgtccgcgttcttcgacatcgtggagcaggacccgatcatctcgcgcgtcaagctcatcgccgaaccgtgggatctgggctccggcggctatcaggtgggcggcttcccgtccagctggtccgaatggaatggccgctaccgcgacaccgtgcgcgacttctggcgctcgcagccctccacgttgcccgaattcgcctcgcgcttgatgggcagctccgacctgtatcaggtcaacggccgtcgaccggtggcgtccgtgaacttcatcaccgcgcatgacggtttcacaatgaacgacctggtcagctacaacgaaaagcacaacgaagccaatggcgagggcaatcgcgacggcgagagcaacaatcgctcttggaattgcggcgttgaaggcccgaccaatattccggacgtcaacgacttgcgtcagcgtcagatgcgcaacatgttcgccacgttgctgttcagccagggtatcccgatgatttgcggtggcgacgaagtggcccgcacccagcagggcaacaacaacgcctactgtcaggacaacgagatctcctggaccaactggcatcttgacaaaggacgcaaggaactgctcgccttcgtttccaaactcattcatctgcgtttggatcatccggtgttgcaccgccgtcgcttcttcacaggccgtgagcccggcgacgattcgaacatgattccgcaggtcgaatggttcgaccacaccggctcgatcatggatatggacgactggcagaacacgcatgcgttctccatgatgatctatctgaacggttcggatattccggaggtcgactggtacggcaaccggatggtcgacaatgacttcatcctgatcttcaacgcgcattacgagccgattatgttcaccctgccggatgagcgatacggccgcaaatggcagctggtcgtggatacgcacaacccggatgagccggaactgagctatgaggcgggcttcatgatcaccgcccagtcccgcagcttcctcatgctcatgagcgacaaaaagcccaagaagcccatgggcctataaccagaccgaatttaagctccctctgacgagggagctcccagtgtagccgggtgagggagagaccgcagcaaagccgcgaacccctactcgcgccccttacgctcctccacgagccgagcatcgacatgattcggctgatcagcacccgttttgaggtgccgatggcggaatcctgccatatcagcgtcgaacaggccgaggactgcatgtcggcgctgttgccaaacctcaagcggtggcggcgtcaggatgagatcgatgcggtggaggaggggaaatgagcgatggcatccgactataaaaaggaatataaggacctgtatcagccgaagaggatgcccgccatcgtcacggtgccggcgatgcggttcgtcgcggtggacggtgtaggagatccgaacgaagaaggcggcgactacgccaaggcgatgcaactgctgtacggcatttcgttcaccatcaaaatgaacaagaagtcaaataatccggacgagcacattgacgggtacttcgactacaccgtgcctccgctggagggcttatggagcatggagaagggtgtgcccggcgtcgattacacgcgtaaaaccgacttctattggacttcgatgattcgtctgccggaattcgtgaccgatgaggtctttgcgtgggccaaggcatcgtttgcctccaagcatcccgaagtcgacatcaatcgtgcatatctcttcgacttcgatgaaggcgtggtcgcgcaggtcatgcacaaaggcccgtacgacgacgagcccgcaaccgtgacgattctggacggctacgcgcgttcgcaaggctacgggctcgacttctccgacgcccgccgccatcacgagatctacctatccgacccgcgccgagccaaaccggaaaatctcaaaaccatcatccgtcatccggtagtgaaggtgggttgactttcggcgaactgctcgaagcgctcaccgcgcagtagcgtgaacaatctgccggaatccttaccggggtcaaagagcgctaccaagaactcgataagcaaaataactagaagcacgggttcctctcggagagattctgcccgagcgaccttataaatccttgcgcgggtcacctttccctgtgcaggaagcatccaggctcatgtgcattgatgacgccgatggattgcagataggcgtagacgatggtggtgccgatgaatcgcatgccgtacgtcttgagatccactgcgatggcgtcggacagaggggatgtagtcatgcctgtctcgtagatgacgtgacggccggtgaaccgccaaatatagtcgtcgaaactgccgtacgacgtctggatatcccggaatgcgttggcattaccgaccgtcgcgacgattttgcgacggttgcggatgatgcccggatcgttcatgagttcggcgatcttgttctcgtcatagcgccggatccgttcgatgtcgaacccatcgaacgcctgacggaaacgctcgcgtttgttcagtatcgtctcccatgacagtccggcttggaaggtctcgagcaccagcatctcaaagaggtggtggtcatcatgcgacggaaccgcccattcggcatcgtgataggcaacatagacgggattgctgagattgcaccagccgcagcgtggtcttatatcgtccatgtgctctccctatgggtcgttggagacggtcggttctagatgttgattcgatgtgtgatccagtataaacggtgtgttcggatagcggtctggatgtgcggattgtctgaaccatatttgccggattgcaggtataaaggggttagttactgcggttgcgggtatttcggtactagttaggggtgattctgggctgtaactcgacaccttttacctgcaacccactcccgcccacgggattgcacaatcggttgcaggtattttggtgtcatttgagattgggaagcggaaatcgatgtcgcatggaatcgaactgactagcaggtggggtcccaacatcacaaaagtcccttagaccgcaaggccatataggttctacggtcatcggataaaaacggataaatcgtttagcggccggataaaagaagaagcccagaatcgttgagattccaggcttttttgtttgtcgggctagcgggatttgaacccacgacatcctgctcccaaagcaggcgcgctaccaaactgcgctatagcccgatgtgccattaaggcacgaggaatcattataaacgacgctggatacattgcgtgtcgagcatatgaattcaaaaaaggttctggattctcttgatagcttatgagtgacatctttattcattgatgctctacaacgactaggtttggatctgcatcgatatccggcgcatccgctggactaacaaggaccgtgcaaacgatgtggcccccgacttcctcgcaggaagtcgggggccacatcgtttgcacggtggactatcggatcaattctgatcagatcagctcgaggtcgacatcgaggctgatcggcttgtccgccgggatatggtactgggggtgcaccggcgacatccaggaatcatcgccgccaacgcccatctgtgcggcaaggacgcgcaggaacacgtgcttcggcttcggcagctcgtcctggtgctgagcctcctcaagcatgaagctggagtacggcaacaggcttaccgcgaacggcgcggcaccatcggcgcggctgacgcgcatgccgtggccgtgatcgtcggtaatctcggcccaacgcacatcctcatggttgcccgtctcctgcggcatgaggtacggcgcatgatccgcgaaagcgttggtgctccacacgccgagcttggcgtgtttgcggtccaggtacgtctccgccgggccggtgccgaagaacctcaggttcgtgtactgcacaggcagcgtccattcgatgccgaacgccgggatggtgggcaggtcaccctgctctccagggtattcgacgtgcaggttcacgcggccatcggtgtgggccgtgtaggagacggtcaccttggtgcgctgcgcggtggcgagctcatacgtgtacgtgcccttgagcgtgctgtcgtcgatctgctcgagcacgttgtccacgcagcgggcgtagcggccggcgcccagccactggacgcgctcgaaaccgtgaccggcgccgcgatcgttgtcggtcagcggacggaaggtggtgattgcgggacggcgcagcacgaactcgttgccggcgaaggtataggagaccatgccgccctgggtgcgcgacagcaggacctcgcgtccggcgcctcgcacgccggcgttccaacggcccacggtgatggtcccatcggccggcttcgtgtcgggcgtcgcggtggcgtccgcgggcaccacggtctgtccgaaggcgagctcgtagccgctttcggcccaatcggtcgccttggcgagacgctgcgaaacctgcagcaccagttcgcgggcgtcggcgcggtacgccgccaccggccatgcgacatcgaacgtgcgggtctcaccggcgggcacgtcgaaacgccgggtggactgccagaccggcttgccgtcggcgagaacgctcaggacgaacacgtagtcgccggtggcggtgaacaggttgtcgttcttgacggacaccgagtccttcgtcacgtcgatgtggacgttcgagtacagctgcttgacttcctgggccttgggggaaggcttgcggtcggcgaacagcaggccgtcgccggagaactcgtagtcggacggacggtcgccgaagtctccgccgtagcgcaggctcctggtgccgtcgggctgggtggcgtagatggcctggtcgatgaagtcccagatgaagccgccctgatacttcgggtagcgttcgagcgccgtgtattcgtccatgttgcccacggagttgcccatggcgtgcatgtattcgcaggagaggtacggcttcttcgggtcgtccttcaggtacttctcgatctcgtcggcatgcgagtacatacgggtctcgatgtcggtgacgtcatcgtagtcacggttgtgggtcacgccctcgtagtgcaccggacggttcgggtcgatgtcgtgcacgtgcttgtacatggcgcggaacacgtcgcccacgtaggattcgttgcccagtgaccagatcagcacgctcgggtggttgtagtcgcgacgcatcatgctgttgacgcggtcgacgcaggcgccttcccattcgcgcttgctacccggcacgatggtgtcctcggtgaggacgtctccgggcagggaccagctgccgtgggcttcgaggttggcttcgtcgatcaggtagatgccgtactcgtcgcacagttcgtaccagcgttcctggttcgggtagtgcgaggtgcggatggagttgatgttgtggcgcttgcagaagaccacgtcatcgatcatgtcctgctcggtgatggcgcggccgcgttcggcgtcgaactcgtggcggtcggcgcccttgaacacgatgcgcttgccgttgatggtcaggatgccgtcctcgatgcggaagcggcggaaaccgaccttctgggacgtgcattcgatgacgtctcccgcctggtcgatgacgtcgacgtcaagctcgtacagcgtcgggctttcggcgctccagggttcgatgccctgcagcggcccgctggagatcgcggtctgcgcctccgcgtcgcccgtcgtctgccacaccgtgttgccgtcggcgtccttcagggtcgcgcggaccgtggccgcgtcggccgcgttgagcacggtcagcgcggcatcgagggaggcggtgccggcctcgggatcccaatcggcttcgatctgcgtgttctcgatgtgcacatgcgggcgggcggcgagttcgacggagcggaacaggccgtgcagacgccagaagtcctgatcctcaagccaggaggcgctggagtattcgtagcaggcgacggccacgacgttctccccgtcgtgcagcagttcggtgatgtcgaactcattgggcgtgaagccgtcctcgccatagccgacgaacgcgccgttgacccacacgtagatcgccgtggccatgccgtggaacacgatcgacaccgatccgccggcctgcttggcgtttgccacgggggcggagacggtgaacttcctgcggtagagcgcgacgtgattgttctccgggatgttcggttccaacgggttctcgtggccgtcccacggatactggacgttcacgtacttgtggttcatcagaccggccgtctgcaggtggcccggaacctggatacgctcgaacgaggagtcgtcgaacgactcggccgtcgcgggttcctcttcgaggttgatgtcggcggcctgaacgacctcgacccgccactcgccgtcaaggctctgcttgagatcggaccattgtccgctctgggggtcgcgggcgtaccacttgtggctggaatgggccggagtccggttcacctcgaacaccgtcgggtcggtcagccaagcctgcgatgcgcgatcgacatgtgtgacgtctgtcatgctctcctgctttctgtcattacctcgttgtgaatgatattatggaagaggccggggcctcctttaccgaaaaggataaacagtttttatataaaacgcaaatcctgtttaccgcttccaaatcactggcactgcttgccgtcgacgctacgccgcgtccatgcaatgtctcggttcagctcatgttatcccatccttgcgacacgctgtttatctccttgtttttactttcagtgataaaacttgtatgcttacggtgataaaacttgtatgcttacggtgataaaacttgtatgctatactttgcaaaatcaatgagtgattccatgctctgggttcttaaggagaagattaatgagcaacgaaaatgtcgcggacggtgacgtccgcaggaagggcgggttaggccagcgcatcgcctacgcgtgcggcaacttggggcaggctgccttctacaacgcgatgagcacgtacttcgtcacgtacgtcaccagctgcctgttcgtcagctacagcaaggctctagccgcccaaatgatcgccgtcatcaccggcctgatcgtcgttatccgcatcgccgagatcttcatcgatccgctgctgggcaacctcgtggataacaccaccaccaagtggggccgtttccgcccgtggcagttcatcggcggactggtctcctccgtgttgatcatgctcatcttctccggcatgttcggactggtcaacgtgaacaccacgctgttcatcgtgctgttcgtcatcacgttcatcgtgcttgacgtgttctactccctgcgtgacatctcctactggggcatgatcccggcgttgtcctccgactcccacgaacgttccacctacaccgcccttggcaccttcaccggctctatcggctacaacggcatcaccgtcatcgtcatcccgatcgtcagctacttcacctggacgttcaccggcgccaagggccagggccaggccggatggacctccttcggcttcatcgtcgcgctcctcggcctgattaccgcctggaccgtcgcctttggcaccaaggaaagcaccagcgcgctgcgtgccaaggcccagaagaacggcaacccgttcgaggcgttcaaggcgctgttccagaacgaccagctgctgtgggtcgccctgtcctacctgctgtacgccatcgcaaacgtcatcacgaccggtgtgatgtactacctcttcgtgttcgtgcttgacgagcctgccgccttctccatcaccggcatcatcccgctgatcgccggattcatcatggcgccgctgtacccgattctcaaccgctggattccccgtcgctacctgttcaccggcggcatggtctccatgattatcggctacacgatgctcgccctgttctccagcaacctgccggtcgtcatcgtcgccctgatcttcttctatgtgcctgcgcagttcatccagatgaccgcgattctgtcgctgaccgactccatcgagtacagccagctgaagaacggcaagcgcaacgaggcggtcaccttgtcggtgcgtcccatgctcgacaagatcggcggcgcgatgtccaacggtgcggtcggtgccgttgccctcgcggctggcatgaccggtcatgccacggcagccgacatgaccgcgtccaacatcgccacgttcaagaccttcgccttctacgtcccgcttgttctcatcatcctcagcctcgtcgtgttctggttcaaggtcaagatcgatgagaagatgcatgcgcagatcgttgaggagctcgaagccaagctcgcttccggcgagatcgtcgacgatgaggcgcaggcagttattaagaactgatctcccgttcccatccctcccataaggcccgtccgcctgaaccgcaagatgcggtccgtggcggacgggcctgttcgttcctgcggtcggcggtcatgaacatacccatgtcggttccggcagtggggccggaaccggcggcgtgtcgactatcggccaggagtgtctatcagctagtatcagctggtatccgatatgggccgtggccctgcgccgcctgccaaaggagataaccgtgcgtgcatgacgtgacttcgcatggccaaaactgctgaccgcggacggacgcggcatcgctttcggtggcgactatagtcccgaccaatggccggaggaaatctgggatgacgacatccgcctgatgggccaggccagcgtcaacaccgtggcccttgccatcttcagctgagatcgcctccagcccatcgaagaccattgggatttctactggctcgatcgcgtcatcgacaagctcggtgacgtgaccgtcgccggaccgcatgtgcaggtgcttgcctcgtatgccggcgaagaagcggatgagtgggagcttgacggcatggccgcgatcacccgcaacacgtacggcgaaggggaggcgtatttcctcggctgcgatctgggcgtgagcgatctgacgcgattcgtgggaggctggcttgccgcgcagccgcaggatggccggcagccggaagccaacctgcggtcgcccgccagcggcgtgacctctgacgttctgcacaccgtgcgtcaatccgacgacgccatattcgacttctatctgacacgtggcagatcggatgtcgaactgcgcgacatcgcaggggagccgatcgtcctgttccgggcggaacggggcagtgacggcggcgcgtatacggtgcatcgcaatggcgttttcgtgacgaagcgcccgaacccgtcggtgtagtcagttgcgacgaaacaggagggcggagccgcggacggttttgtgagacggtccgcggcctcaccgttggaagccgcggactcggatcatcagcaacggacgcgccgttgatttccacttccggagcaacgatggtgagctttgccgcgacgagatgctgcaggacggtgccgacgtacatggtgcccggattctcccttcgccgctgcgctgcctgccgcagcagatgttccacggccgcatcaacggaaagcgagttgtcggactccagcttgaatggtttgctggtgaagaacgcctgaattcgtttgacccagtattgctcgatctcggtgaattgctctgctgtcggacgtaattcattgatgagctcggcatagtcatgcatcagcgccatggtgccgcggctggttcgtcccttaaaggttgaaccgatagaaccgtcattcattactttttcaacgataccgacacgctcattcgattgtgtccaatactgctttctttctgcatgaacaacggtactcggcaaggcggtaacgatagtcgcaaaggctaagaagcccgtacataatcgtttttctgtagtgtttcagattttcagtagaatggcgacagccaaatcccgctggcttgctagtaaagcgttgtcctcggggggagttttgtttgttgttgaaagataacgcggcatcgaatagataggggaggcccggcatgggacgtcatcagcgtgcagaaacctccggactcatctccttcttgatttgcgccgtcgttggcgcggtatcgatgaacctgtacatggaatacgcgccggccatctggcagctgacgcaacgccgattcatggtatgttcgggcatcgtggcggcatgcggcgtcatttccttcattattggctatgcgcgcaaatcacgttcattgaacctcaaacatggttggtttgcaccgattcgtcgcattttcgaaatcgtcgccctttcggtggtgtatgcctcgaccattttcctgtcgtcttttgcactcatcggtgcggccaacgacatgatgggcaatgccatcttctccggctatatctccagcgtctgcgccgccttcgccggcgtggtggggtacatgacctttgtacaggcggagatgatgaacgccaaaactattgccagtctgttgccgttcttcgtcatctccggcgtggtcaccgccggcatgaccaccgacgacccatactggtatcacaacaacttttcgcagcttggtgacagaaccacgttcgcggcccgtatgttcaactccacgctgattcttgccggcacatgcatcatcatcgtcagctacttcgccatctccgaattggtgaccaccgaacggctacagcgcctctggcacgaccgcaccaacagagatccgaatcgcggctacgaaatcccacatttcatgctgcgcatctccattctgtccttcctgctgatggtggccggcctggcattcatcggcatcggcgtgttccggtacacgccacacaatctcttgcacaatatatgcgccaaaggcctgccgttcgtcatgctgctgctgttcgtgctcctgccatggcttgcgccacgcctgtccaaaacagtgatggtggcctccgacctgaccgcgctcgtatgcgctgcattctgggtcaatatgatgatgggtcacaacaccctcaccaatgtggaggcgttggctggtctggcgttcctaggctggttcatcgtgttctcgcgccagatcgccgccatcgaggccgaccgcgtggccgcccagctgctgcacgcgcaggccatcgaaggcggttttgagcagccgtcttccgcacctgatcagcagatcgaatcccgcatcgctgccgaccggtgaataatttgtttgatagatttggccttatgactgaacgactcacgaatctctggcctgccccgctcgccgcacagccgttgaacgctacggtaacggtgccgggcagcaagtccctatccaaccgctacctgattctcgccgccctcggcagcaagcccgttactctgattggcctgctgcgttcgcgcgacacggaccttatgatgggcgcactcgaagccctcggtgtccgctgcgacgtggattccgcaaccgacaccaccgtaacggttactcctcctgtatccggccgattccatggcaacgtcaatgtgttctgcggactggccggcacggtgatgcgtttcgtgcccggccttgccctgtttgcagatggcccagtgaattttgatggcgacgaacaggcttatgcacgtccgatgaagccggtgcttgacggtttggaacagctgggtgcaacggttgattaccacggcgaggttggccgtctgccgttcactattacgccgcctgcaaccttgccggctgcccaggcgcaggtcagcatcgattcgtccggttcttcccagttcatctccggcctgttgctgattagttccaaactgcctggcggtctgcacctcgcgcacacgggggagaagaccccgagtctgccgcacattcgcatgaccgtggccgatgtgaccggtgccggcggtgcggttgaggccgacgaatccgcccgcacatggacggttgaaccgcgcgcaatgcaactgtcgagcaaggtgaccgttgagcccgatctgtcgaacgcggcgccattcctcggcgcggcattgatcgccggcggcacggtccgggtgcctcattggcctgaaaccaccacccagccgggcggcctgttgcccggatatctggagcagatgggtgccgaagtatcgttcccgaccatcggcggcgtgcgctattgcgaggtgaccggtgacggcaccgtgcgtgggctgggtacgttcgatttgacggcggccggggagattgcgccctcgttggcggcgattctggtgtttgctgataagtcgacagacatggttggtattggtcacctgcgcggccacgaaacgaatcgtctggaggcattggtcaacgagattcgtcgtgttgggggagcggctgaggaattgcctgatggattgcgtatcgaaccggtgccggcggagacgttgcacggtgccgtgatggaaacctatgctgatcaccgtatggccacgttcgccgcgatgctggggctgcgtattcccgatatcgaggtcatcaacgtggccaccacgcgcaagaccttgcctgatttcgtcggtatgtggagtggcatgctgaggcagtaaggggtcctgtgttctggtggaactcccctcagtccgccggaggcgactgagggggagtatgacgcaggggtaggggtctcatgaccatatacgaatgggggctgattccaatcggaatcagcccccatagtgttgcaactagagattggtgagatgcctaacggcggttacttacttggcgaaggtgttgccgtaggtgtcggtgccggcttcggcgattgcggcggacttgcgggcgatggccagctcttcgttcgtcggaatcacggcgatgatcacggaggagtccggagtggagatgatgcgcggttccttggagcgggtggcgttcttctcctcgtccagcttgacgccgaacggagcgagcttgtcgcacaccatcttgcggaccacgtcgtcgttctcgcccacgccagcggtgaaggtaatcacgtcgcagccacccatctggtaggtgtagttgccgatgtagctgacgatgcggtgcacgtagacatccagagccagcttggcgtcctcattgccctcggacaccagacggtgaacctcacgcaaatcgccatagccggtcatgcccatcatgccggaacgcttgttgaacagggcgtcaagctcgtccacgttcatgtgggcgttgcggatcaggtggaagaccacagccgggtcgatgtcaccggtacggccgcccatcatcaggccctcaagcggggtcagacccatggaggtctcaaccggcttgccggagacctcagcggaagcggaagcgccgttgccgatgtgcaaaacgatctgcttcaggccttcagccggcttgccgatgacgtccggcaccacggaggagatgtactcgtgggaggtgccgtgggcgccgtagcggcggatgtggtactgatcggcgatttccttgttcagcgcgtaggtgctggcggccttcggcagctggaagaagaaggaggaatcgaagacgaagatctgcggaacgtccggcagcagggagcgcatgacttcggcgcccttggcctccggtccgttgtgcagcggggcgagcacagccagatccttgacctggttgatggtcttgttggtcacgagggccggcttcgggaagatggagccaccctgcaccacacggtggccgacggcgacaatgccagcctcagacaggttcgggccgtactcctcgaagaagccgagcacgcgcttcagaccctgctcgtggtcgtgaatcggctcttcaagctcgtgcttttcgccgttgtactcgtgcttgtagtggccgtcgaccggctcaccgatcttctcgacgaggccggaagcgaggccttcgccggattcgagatcaaccagctggtacttgatcgagctggagccggaattgatgacaaggacggttttcgccattgtgggcatcctccattgtgattgaatgttcccgtgagacacgggttaccgttgattagattactcgttgcttgctacaaaataagcattacggtggctcccgctggcgggagccaccgggagccaagccgggctcactgcgcttcgatggcggtgagggcgatggtgttgatgatgtcctgcaccagagcaccacgggacaggtcgtttaccggcttgttgagaccctgcagcaccgggccgatggccaaggcgccggaggagcgctgcacggctttgtagccgatgttgccggcgcacaggtccgggaagacgaacacgttgacgtgtccggccacatcgttgcccttggccttggtggcggccacggtgggggaccaggcggcgtcgaactggatggaaccgaccaccggcagatccggagccttctccttgagcagcttggtggcttcctcgaccatgtccacgtccggtcccttgccggagccgagggtggagtaggagagcataccgaccttcgggtcgatgccgaaggcacgtgcggtctcggcggactgcaacgcgatttcggaaagctgctcggcatccgggttgaggttgatggcgcagtcggagaacacggccacatggtccttgaagcacatgagaaatgcgccggagaccagcttctggccgggcttggtcttgatgacctgcagggccgggcgcacggtgttggcggtggagttcacggagccggagaccaggccgtcggcgtagccgagcaccacgagcatggtgccgaagtagctggcgtcggccagctgcttgcgggcctgctcctcggtcatgcccttcttggcacgcaactcgcacagcttggcgaccatgggcttcaacacgttctcgtcgtccatagcctggaagcgggcgcgctccaagtagttcaggcccagttccttgccgcgagccagaatggcgtccttgttgcccacgatgatgaggttcacgatctcgcgctcaagcaggtagtcggccgccttgatgatgcggtcctcctcgccttcgggcagcacgatggtcttcttgttgctcttggccttgccgagcaggccgaactggaaggcgtacggggtgatgggcgcggtgacgtccacatcgagcgcggcgagcacttcatcggtgggagcgttcttacggaaggtctccagcgccagatccttggtggattcatcggtgaacggcacctgcggcagagtccagaccggcaggccgtacttggcgagggtctccttaacggagaaagcgtggcgcggctcgcatccggtcacgaagatgccgagcaccttgttgccagcggcctccatgccctcgatggacagcttgacggtctcgtcgagctcgtgcggccaacggtcgatggtgcacacggctaggaacacgccggccttcagatcagcggcgacattcgcgtcgaattcatagctggtcggatcgttgacgtgggacttgtcggtgcccacgatcagggcggcgtccgcgcgggaaacgtccatggcatcgttgaacgcgccgacgatatcgccacgggcggtgtccttatcctcgcgcaccttgtgcacatcgaggccggtggacagggccacgccgagtccggcattggaggcggcgagcaggatcggggtgaattcgtcatggttggacacagcagggcggaacaccatggtcttgtacttggaagtcaatgcgttgagcatgccgtaagcgacgacgttgcggccattggcgccttcagggctggcgatatatacacgggtgacggtcacgatgtttttgtctcctttgataatcaacacgatagggaccacacctcattgtagtggcgattactgttatcgctcacgccggtgtcgcgccaatcggaagagcgtccccttggcgacgctttccggggaatgttgcgcaaaaccccaaaagtcgtccgataggccagaaaacgaaaaaggccggtgcgtgaagcactggcctcgattgtggagctagggggattcgaacccccgaccctctccatgccatggagatgcgctaccagctgcgctatagccccgagtgaagctatccgattcatgggagtcgcaagacccgccatgaaccagcggagaaaccaccatatcgcctgatttgatggcttcgtcgtggagctagggggattcgaacccccgaccctctccatgccatggagatgcgctaccagctgcgctatagccccgttttcagttgttggcccgttgtttggacctcgtatacattacgacgagatgtcgattctggcaaaagccggcgtgtcgccaaatggcaaaagtgggatttggcgacactttttggcttgtttccgccattattcaggcattgggttattcaattactgcttgaacggtttttcgaatacactgaacctgttggctcagcaggggagccgtgacacgatcagcgttcgcgttcccactcgtcggtgtcggcgatggccggaccgtgattgtagtccagcagacgccagcgcacagtgccatcgggattgtccatcggcaccaagcgcacccagtgcgcattacgcaatgaaaccaccgtggaaaaggtcggatcgattgcagaaatgcccaacagggtctgcaatgtctgcgcaatccatgcgccgtgcgagaacacgaacaggtccgtgtcgtctccggcacgcgtggaccagtcctcaagagcctccacgccgcgcttgcccacagcttccttgggctcggctccatacttcagctcgccgccccgagactccatccaggaacggaagtcctcggggtagcgttcggccagttcggccacggcatggccatcccaatcaccgaagctgcgttcacggacgcgacgatcatcgacgggctcgattccacccaatacgtcggcgaaagcttgcgcggtggcgtgcgcacgcttcaaatcggagcagacaatgaaccggtggttgatttccggccgacgatcgacgtacaggcttttcaaggccgcggcggtctgcttgacctgccattcacccacggcgtccagcggaatgtcgacctggccttggagcttgtgagcggcgttgtaggaggtacgtccatgacggataaggaaaacggaacgaacatgattggtcatagtgacgatcctttcggttccagtgaggaaacaggaaaaaggggagggctgcctggtgccgtcaatgacgttcggcaacaggcagcccgacacgcgaatatcagcgaattcgcgtatcagcgttacgcgattcgcacgttacgcggtggtgacggcagcatcttccgcatgctccgccgtttccgggtgtgcgagttcaagatcgatggccgggcagtcgcgccagagtcgttcgagcccgtagaattcgcgcgattcctcgtgcatgacatgaaccacgaaatcaccgtagtcaagcagcacccactggccctcggtcaggccctcgcgcgagcgcggctggcggccggagcacttaaggaacaggtccttttcgatttcctcggccacggccagcacctggcgctcgttggaggcgccggcgatcatcatgatgtcggtgatgccgagcaggtcggctacgtcgaaggccacgatgtcggtggctttgatacggtccgcggcctcggcggccacgcggacggcgttgatggaatcctgaagtgcgggcatggttcagcgctcccaggcgggcttccagccctcgacgttgtgttgcgtattctcggagtagaccatcgtgtcgctcggcacggcgtggcgcaccacggaaccggcgccggtggtcacattgtcgcccacttcaaccggggccacgaacaggttgccggcacccacgtggcagccggagccgatggtggtgctgttcttgtgcacgccgtcatagttggcggtaatggtgccgccgccgatgttggtgtggtcgccgagctgggcgtcgcccacgtagctcaggtgcggcaccttggtgccgttgccgatgtgcgccttcttcatttcgacgaacgcgccggccttggcatcctcgccgaactcgttgcccgggcgcaggtaggtccacgggccgatgttcgtgcgtgcgccgatgtgcgattcctgtacgcgggaacgctcgaccacggcaccttcgtccacggtcgcgtcgatcagggtggtgtacgggccgacgatggcgtcctcgccgaccaccgtgtggccttgcaggaaggagccgggcaggatggtggcgtcgcggccgatctggacatcgtcctcgatccaagtggtttccgggtcaagaatggtcacgccgtcgcgcatccagcgctcgcagacgcggcggttgtaggtcttggacagcgcggccagctgcacgcggtcgttcacgccttcgacggtgagcggatccggagcagcgaacgcgccgactttgccagcggccttggcggtttccagcgcgtcggtcagatagaactcaccctgcgcgttgttcgacttcagtccggcgattgcctcggtaagcacggaagcctcgaacacgtagactgaggtgttcacttcctgcacggcgagttcgctgcggttggcgtctttctgctcgacgatgcgcagcacgttgccttcgcgatcgcggatgatgcggccgtagccggtcgggtcatcgaggatggtggtgagcacagtggcgccgttgccggaggcggtgtggaattcgaccagacggtgcagcgtctcgctgtcgagcagcggcatgtcggaggcggcgatcagcaccgggccatcgaccttgccagcctcggtgagctgcgccattgcgcactgcacggcgcggccggtaccgggaatgtcgtcctggttcacaatggtgacctgctcgtcataggagcgggcggcttcggcgacgcgctcggcctggaagtgcacgaccacggccagcgtgtcgggattcagggcggccaccgaatccatgaccctgttcaggaaggtcttgcctgcaaaagcatgcagcaccttcggcttgttggaacgcatgcgggtaccctcgccggctgcgaggacgatggctgcggataatgccataactgacgtattcccttcgatcggaatgtctattgagggtggaaacacctcaaaacaatagacggccgcccggatgtcgagcggccgtcagccgttcccccacctggactcgaaccaagacaaagggttccaaagacccgtgtgctgccattacaccatgggggagtcgtgggctttcggcccacaagtgttcatttataccatattgtcggtatttaccgaaagactacgccatgtcgcgtctcgcatcgtgtgctttccacgaacaaacacgcacgtgatcaggcgaacaggaagccttgaccgtggtgctcggggtaggtgtcgaacagttcggcgaccgagccgtcctcgaatacggcgcggatggcgctggccagcagcggggcgatcgacaggacggtcaagccatcccagcgcttttcctcgggaatcggcacggtgtcggtcagcacgacctcgcgcgcaccgcagttcttgagtcgctcgacggccgggccggagagcacgccatgcgtggcgaccacggtcaccgacttggctcccgcgtcctgcagcacgtggcatgcgcccgcgatggtaccggcggtgtcgatcaggtcatcgacaagcacgcagtccttgccggcaacgtcgccgaccacacggttggcgaccgcctggttcgggcgggtgatgtcgcgcgtcttgtgcacgaaagcgagcggaccgccgccgagacgctgcgcccactgctcggccacgcgaatgcggccggcgtcgggggagacgacggcgacgttgtcgagatggccctggaaacgatcacggatgtagtcgaccagcactggcatggccaccagatgatcgaccgggccgtcgaagaagccttgggactgcgcggcatgcagatcgaccgacatgatgcggtcggcaccggcggtcttcagcaggtcgaacaccagacggcaggagatgggctcgcggccgcggtgcttcttgtcctgacgggagtagccgagcaacgggcagaccgcagtaatggaacgggccgaggcgcgcttcaatgcgtcgatcatgatgagctgctccatgatcgccttgttgatgggcttgtagtggctttgcagcacgaacacatcggcgccacgcaccgattcagtgtagcgcacgtacatctcgccgttggcgaaatcgtatgcggtggtttcaaggacgtcgatgccgagctgctcggcgacatcctcagccaacttcggatgaatccttcccgtaacgagaataagattcttatcgggctttccttcaaggattgcgctcaccatgtctcccaacgtgtggtctcgttgatgcagtcttcagcatagccgttcttcacgaccggttggacaactcagcgttgcctgccgttcacctgccgcttgcgatccattgttcgatggtctgtctgaccgcctttgcatagatatcgctatccatgctcgggtggatgccgtcggagccgagcacctgcgcgttcgcgttggctgtggcatcccaatccaccagcaccacattgtccggatgtgcggccgcatagtcggcaagcacctggttggtaggtggaatccacgtacggtctccgtgggcattgaccagtaccagcacgcggtcggggccgatcatattacgaatctggtccaactgatcgggggtgattgccgaattggtgccaaggccgatcaacacccactgccgcagactgccggcggacagagcgttgccgatgagttcgggggcgaccatgatggagcgggaaacgctcgcgtcggtctgaatgccggggaagacttccgaaaggccctgtgatgaggccagcatcaccgaatcgcctatggcggtaatctgatcgccggtgggcatctcatgcttgggcttgggcggtgccggcacggcatggcgcagcagcacgtgttcggttttctgcatacgttccagttgtgcggcctgttgctccagctggatctgcatggcggttttcgcaggtgcatgagcaatgccctgcacgcagccggccaacgacagcaccaggataacgtcaacggcaataacccgggccacatgattcttcttgttcgtgcgaaggggcaccacgacggataccgccgagtgcgttgccgccggtttctccaccatcagccaggaaatcatcaccgcaatggcggtgagcaacgcggtcatgatgagaggccaaggccctactgccttgaagatcttcggggcaagggcgctggaaagaatccacaacggccagtgccacaggtagatgccgtacgaatacttgccgagggaggccaatggcttgaacaccatgaggctttgcatccaggaatcgtcggagatggtaccggcaatcagcagcacggacaacaagctggacaatatgatgccaccgcggaaggcgaatgcatcctgtttgccgataaccgccatggtgaccaaggcaatcaggctgaggaacgccaataccggtgccgccgcattccagatgcgatgctccacgggaatctgaggtaacggagcccgatgtgcggctgccgaagcgctcgagctaatggtgcggggcatcggcacagccctctggcgagcgtggcccaactgaggagcggtgacccaccaggcgagagccacacccagcatcaggcccatgctgtgggtatcggtgccgaagtagacgcgggtggggtcgcctttgggcacatacatcacccacatggcgatactgctgaacgccgcgagtcccagtgggatgagtgaagacagtttcgtctggcggagcttccacatcagccagacgatgaacggcacgatgacgtagaactgcatgagcacgccaatgaaccacagatggcgaaacacctgcgggttcatttggtcgaaatagctttggcctccggcaatggcgtaccagttgtagcagcccagcagcacggtgatgacttggtcgcggatggaaactagaatgtcgtgatcgaacagccagccgacggagacgatgaccggaatcagcagaaacagcgccggatagagacgtactgcacgcttgggaatatatcgcacgagattcagcgatccggttttcgccagagaacgaatcaaactgacggcaatcaggaatccagagacggtgaagaacacgtcgactccgtagaatccgcctggcagccgttgctgcatgcagtggtacagcacaatggctatcagcgccagtcctttaataccgtctaaacccacgaaccgcttcacggataatccttctctctccgtagtgccgatggcattccccgttctctccaacaaacggaaaacaagcccagcatggccgaggggagagacaatgcgacagcagcgaatcgtcaggccgcatgctgcatgattaccggcttgacgattcgcggcataccgcgcttatcggtggcgcttaccggtgatacagactcacccgttcgtacttcggttcgcagcacacgttgatgccgagtttgcgatacagcgcctcgtccgtggatgagatgataacggagaagaaggcgtcgcagccctgcaactgtttgagcccgtcgatgacgcgagcggccacaggactggtggcgctggtgattgacaatgcaatcagcgtctcatccgagtgcaagcgtcggttcacgctgttgagatgttggcggcttgcagttcgatgtatttttcgttgtcgaatccctggcgcaaagaggtcggcatccctttccggacgacgtcgtaagcggaaaaattataccgggcatcgtcggcaacaaaaaagggattccccgatggagaatcccattcgtcacagagagcaattactcccattcaattgtggccggaggcttgctcgtgcaatcgagaacgacgcggttgatctgtcggcattcgttggtgatgcgcgtggagatcgtggcgagcacgtcgtagggcacgcgagaccagtcggcggtcatggcgtcttccgagctgaccgggcgcaggacgatcggcgagccgtaggtgcgctcgtcgccttggacgccgacagagtgaacgtcagccagaagcacgaccgggcactgccagatgtcgcggtcgagaccggccttggagagttcctcgcgggcgatggcgtcggcctcgcgcagcaggtcgaggcgctccttggtgatctcgccgatgatgcggatgcccagacccgggcccgggaagggctgacgccagacgatttcgtcgggcagaccgagctcggtgccgatggcgcgcacctcatccttgaacagagtgcgcagcggttcgatgagctggaacttgatgtcctcgggcaggccgccgacgttgtggtggctcttgatgttggccgcgccgtcgccgccgccggattcgacgacgtcggggtagagcgtgccctgcacgaggaacttgacctccttgccgcgggcgccggcctcttcgaggacctggcgctgggccttctcgaaggtgcggatgaacttctcgccgatgatcttgcgcttgcgctccggctcggagacgcctgcgagggcgtcgaggaagtcgtcggcggcgtcgacggtgatgaggcggatgccggtcgcggcgacgaagtcgtgcttgacctgctcgacttcgcccttgcgcagcaggccgtggtccacgaacacgcaggtgagctggtcgccgatggccttgtgtaccagagcggcggccacggcggaatcaacgccgccggacaggccgcagatcacctcggcgtcgccgacctgctcgcggatcttcttgacttgatcctcgataatcgaggaggcatcccagtcgttgggcagcgcggcgcaacggtgcaggaagttttcgataagcttctggccaagcggggagtgcttgacttccgggtgccactgcacaccatagagcttgcgggattcgtccgccatggcggccacgggcgcgccttcggtgtgggccagcacttcgaagccggccggggcctgttcgaccgccacaccgtggctcatccacgtggtctgctcggcgggggagtcggcgaggatgccggcggcgtcgtcgatggtggctgaggtcttgccgtattcgccgagcgcggccttatccaccttgccgccgagctcataggccatgacctggaagccgtagcagataccaagcaccggaacaccggattcgaataccttggtgtctatggtcggcgcgccgggctcgaacacggaggccgggccgccagacagaataatcgccttcggatccttggccaggatctcgtcgaccggcatggaatgagggaccagctcggagtacacgcctgcttcgcgcacgcggcgggcgatgagctgggcgtactgggcgccgaagtcgacgacaagcacaggaccgtttgccattgatattcccctaacgttcattggaattttacgtgggctgaacacccctgattatcactggtcaaggcgacaaggccgacacgcagagactatgtgcgcaaatcgaacaaactacatgcctgtagacggacaacacgccgatttcgaacatgggaaatcgaacgtgcgctgttctagccaaatgctggatttccgcatgcttccgccgttttgaaaaagtatgttgaaaaaactaatgttgacaaacggtcagtcgaaccgcacaaatactgaaatttccgcaacaatttcgaacacacccgcaagaaatcgttcaaaagtcgcgttgtcctcgtaccatgacgattgattgggaacggaaaaccttggcaccgcaagggtcagggaccgtgaccgaacagaaataatcaatcgcacgatcacgtgcaggagtacaggagtacacatgacgagtcctgttattggcaccccttggaagaagctcaacgctccggtttccgaggaagccctcgaaggcgttgacaagtactggcgcgttgccaactacctttccatcggccagatttatctgcgttccaacccgctgatgaaggagcccttcacccgcgaagatgtgaagcaccgtctggtgggccactggggcaccacccctggcctgaacttcctcatcggccacatcaaccgtttcattgctgaccacggccagaacaccgtgatcatcatgggcccgggccacggtggcccggccggtacctcccagtcctacctggacggcacctacaccgagaccttcccgaagatcaccaaggacgaagctggtctgcagaagttcttccgtcagttctcttacccgggcggcattccgtcccacttcgctccggagaccccgggctccatccacgagggtggtgagctgggttacgctctgtcccacgcttacggcgccatcatggacaacccgagcctgttcgtcccggccatcgtcggcgacggcgaggctgagaccggcccgctggctaccggctggcagtccaacaagctcgtgaacccgcgcaccgacggtatcgtgctgccgatcctgcacctcaacggctacaagatcgccaacccgaccatcctgtcccgcatctccgacgaagagctccacgagttcttccacggcatgggttacgagccctacgagttcgtcgctggcttcgatgatgaggaccacatgtccatccaccgtcgcttcgccgagctgtgggagaccatctgggacgagatctgcgacatcaaggccaccgctcagaccgacaacgtgcaccgtccgttctacccgatgctgatcttccgcaccccgaagggctggacctgcccgaagtacatcgacggcaagaagaccgagggctcctggcgttcccaccaggtgccgctggcttccgcccgcgacaccgaggcccacttcgaggttctcaagaactggctcgagtcctacaagccggaagagctgttcgacgccaacggtgctgtcaaggacgacgtccttgccttcatgccgaagggcgagctgcgtatcggtgccaacccgaacgccaacggtggtgtgatccgcaacgacctgaagctgccgaacctcgaggactacgaggtcaaggaagtggctgagtacggccacggctggggccagctcgaggccacccgtaccctgggtgcctacactcgcgacatcatcaagaacaacccgcgcgacttccgcatcttcggaccggatgagaccgcttccaaccgtctgcaggcttcctacgaagtcaccaacaagcagtgggatgccggctacatctccgacgaggtcgacgagcacatgcacgtctccggccaggtcgttgagcagctgtccgagcaccagatggaaggcttcctcgaggcctacctgctgaccggtcgtcacggcatctggagctcctacgagtccttcgtccacgtgatcgactccatgctgaaccagcacgccaagtggcttgaggctaccgtccgcgagattccgtggcgcaagccgatcgcctccatgaacctgctggtctcctcccacgtttggcgtcaggaccacaacggcttctcccaccaggatccgggtgtcacctccgtcctgctgaacaagtgcttccacaacgaccacgtcatcggcatctacttcgccaccgatgcgaacatgctgctggccatcgccgagaagtgctacaagtccaccaacaagatcaacgccatcatcgctggtaagcagcctgctgccacctggctgaccctggacgaggctcgtgccgagctcgagaagggtgccgccgcttgggattgggcttccaccgccaagaacaacgatgaggccgaggtcgtgcttgccgccgccggcgatgtcccgactcaggagatcatggctgcttccgacaagctgaaggaactgggcgtcaagttcaaggttgtgaacgttgccgacctgctctccctgcagtccgccaaggagaacgacgaggctctgaccgacgaggagttcgccgacatcttcaccgccgacaagccggtgctgttcgcgtaccactcctacgctcacgacgtgcgtggcctgatctacgaccgtccgaaccacgacaacttcaacgtccacggctacgaggaggagggctccaccaccaccccgtacgacatggttcgtgtcaaccgcatcgaccgctacgagctgaccgctgaggctctgcgcatgatcgacgccgacaagtacgccgacaagatcgacgagctcgagaagttccgtgatgaggccttccagttcgccgtcgacaacggctacgatcacccggactacaccgactgggtgtactccggcgtgaacaccgacaagaagggtgccgtcaccgctaccgccgctaccgctggcgacaacgagtgataacgcctccacggtgttgttagttcgctaacaccaaagggctcgggattcgtcccgagccctttgcttattcataagccctgtcacggcggggcagaacaaagcgaactgttgtgatgttttagtcgcgtagcaccccgaaatgcagcagggcattgcgcacaccgtcgtggtccacatcgtcagtgatgtagtcggcggcggccttgggctcggcggtcgcattgcccatcgcgactccgatgccggcgtaggcgagcatatccgtgtcattgccgccatcgccgaaggccatggtctgctcgcgcgtgatgccgtaatgcgccatgaaccgctggatgccgcgcggcttgccgccatcggccggaatcagatccgtgaaatccggatgccaacgcaccccgcgcacattgctgcacagtcccaccagttcggcctccaactcgggcccgacaaagggactgatctggaaagtctcatgatccagcgcgcgggtgcgtgggtcgtcaaaataccgggtcggtgcggttttgcccagtttgctccacgtggcgcgaagcagatcactggactggttgaagtacacgtaatccttctcgccgaaattgcacaccacatcggggtgacggtccagccagtcgagaatcacctcaatatcagcagtatccaaggcctgcgaggcaaagaagccggtgtcatcaaagcaatactgcccattgaacgccaccacgccatcgaacgtcaccggcatggtatccagcaccacgtgcatctgtgaaggcgcgcggcccgtgcaaatcagcaccttgacgcctgcggcctgcagccggtgaatcgcctcgattgtggaatccggcaccgtatgggtcgtgaaactggtgagcgtgccatcgatatcgaagaatacggctcggatatcggcattggcggtatcggtagtcatagcttccattgtcaaagcccctctcgacgtgctttccggcgtgttcggcacgcctatagcgggttatcaaacgcacgaatcccggacattgcatgcgcgccataaaagacacctatattgcaatcggccattttccgccactttcgcggttcaagcgcgttatggtgttacccgacatcaattttggagagaggaaatccaatgaccgcatcaacccagccggcaaccccggccgctcctaacaataacgagccggtgcgtgtgaaccacaccgcccgcaacgtcatcatcaccatcgtggtcgtggcgattatcgccgtggcagcgttcttcggctaccgcgcgtttgccggtgccaacgagtcgtccgccaagggcagcaagggcaacccggtcaagatcggcgtggtcggcgctaccaaccccgaatgggtcaagttcaagcagaacgccgagaaggccggcatctacgtcgacatcgtcgacttccaggactacacctccgaaaacccggcccttgactccggcgagctggacctcaacgaattccagcacctgctctacttggccaactacaacgtgagcaacaagaaggacctgcagcccatcggcggcaccgccatctacccgctcggcgtgtactccaccaaggtcaaggacatcaaggacctgaagcagggcgacaccgtcaccattccgaacgacgaaaccaaccaggcccgcgctatcggcgtgctcaaggccgccggtctcgtgacgctcaaggacgactggaccgccttctccaccccggccgacatcgacgaagccaagagcaaggtcaaggtcaccccgctcaaggccgaacaggtggccaccaccctgaaggacccgaccatcgccgctggtgtgatcaacaacgactacgtggccgacgccggtctcgacccgaaggacgccatctaccaggatgacgccgaatccgaagaagctcgcccctacatcaacgtgtgggtggcccgcaaggcggacgtgaacaacgagacctacaaaaagctcgtttccatctaccagcagaaggatgtgctcgacgccctgcaggagaactccggcggtaccgcggtgttcgccgacaagttcagcgccagcgagctgcaaggcttcctgtccgacattgagaaggatgccaaggcccagcagtgagccgcggctgatacgagcgcacgactaacctgtccatagccattaccaccaagcggagcgagtacccgagccaacaatcgggattcgctccgcttccgtgaccggacaccaacaaccagcatcagggagcattatgagcgaccccatcatcaccttcgaccatgtcgtgaaggaattcaaaacacgcggacgcggcgcgaacatcgcacgagccgtggatgacgtcagcctgaccatcgatcgcggcgacatcttcggcatcatcggctattccggtgcaggcaaatccacactggtccggcttatcaacgcgctcgaacgacccacctccggcgctgtgaccgtgcttggcactgatatcacctctctgagtgagaccaagctgcggcccatccgccagaaaatcggcatgattttccagcagttcaacctgttctccaccaaaaccgtggcccagaacatcgcctacccactgcaactcgatcactggcgcaaggactatcaggatcgtcgtgtcaacgaactccttgaattcgtgggcctcagtgagcacgcaaacaaatacccttcgcagctgtccggcggccagaagcagcgcgtcggcatcgcccgcgcactggccactaatccggagattctgctcgccgacgaagccaccagcgcgctcgacccggaaaccaccaccgaggtgctggccttgctcaagcgtgtgaacgaggaattcggcatcaccattgtgcttatcacccatcagatgaacgtggtccagcagattgccggccgcgtggccgtaatgagcgccggacgcgtggttgaatccggcgacgtatacgatgtgttcgccgcaccccagcagccggtgaccaagcgattcatcgccaccgcattgtctggcctgcccgaggaagaccgggtcgagcgattgcatcacgaatggtcgggccgcattgtcaccgtgcttatccgccaaaaggacgtttccggcacccaaggccatgaactcaaggcatccggacagaatatctccgaactcatcgccaaatacggcgttgaatccagcctgctctacggcggtatcgacacggtcaaaggtaccgccatcggtgccatcacctacgaattcaacgggcccggctggcatgtggacgaattcctgcgcgagctcgccgtcaatagcgacgtcatcgacttcggcaccgccgcaaagcctgtggcttacgccgacgcggtcgctggacacgccgcctacgccgaagaccgatcctatgacccgctggcggccgatactgcctctgcatccaccgcgtccgctgtatccgccgccgcacatgaaggagacaacgcatgatcatcctcgccaacccgcgtagcgactggaacgtgctgcgcccgctactgttcgaatccattggacagaccctgaccatggtgctcgtgaccctcgtcatcggcggattcctcggcctgatcctcggcgtggtgctctacggcacccgccccggcaacctgttcgagaacgcggtcgtctaccgcatccttgacatcatcgtcaacatcgtgcgcccgattccgttcatcatcttcctggcagccatgcagccgctcaccatcgtcgtggtcggcacgtccatcggcaccgtggccgccatcttcccgatggtggtgatgtgcaccttcgccacctcgcgtctggtcgaacagaatctcgtgccggtcgacccgggagtaatcgaggccgcgcgttcgatgggtgccggcaagctcaccatcatccgcaccgtgctcatccccgaagccctggcaccgctgatcctggcctacgccttcctgttcattggcgtgctcgacatgtctgccatggccggctacatcggcggtggcggtctcggtaacttcgccatcgcctacggctaccagaagttcgaccagaccgtcacctggacggccgtgatcatcatgatcgtactggtccaggtggtgcagggcatcgccaacgccatcgccaaacgactgctcaaacgccagcaataacaaggcatactgaccccatagatcgcggccctcgccaatatggagcgagggccgcaatatattcttcgcgctactagaatcgggaaccatgagtgaacatatcgacatcgaccacgaactcatcactatccgccactacctgcacgcccatccggagcgtagtttccgtgaattcggcaccagcatctatctgaccgaccagctcaaggcgcacggcatcgagatcctgcacaacccgctggagactggtgttgtggggctcattcagggcgaggccggtcccgggccgcgtatcgggctgcgcgctgacatcgacggcctgcccatcgtggaagactccggactggagttcagctccgtcaatgaaggcgtgatgcacggctgcggccacgacctgcacatgaccggtctgctcggtgccgccttctggctcgccgagcaccgtgacaagttcgccggctcgatcaagattctgttccagccgagtgaggagaccggccaaggcgctcgcgccatgatcgacgccggactcgtggatgacgtcgaagccattatcggcacgcacaacaaccccaactatgcgcccggccagctggccatcggcgttgagccgatgatggccggctgcgtgaaattccgcgtgaccctccacgcccaaggcacccacgccggttacccgtacaagggcaccgggcccatcgaagcgctcgccagtattattctgagcctgcagaccatcgtgagccgcaacgtcacgcccttccacccgctggtgctgtccgttaccgaagtgcacggcggccatgtgtggaacgtggtgcccgccgaagccggattccaagggactgtgcgctatttccacaagtcggatggcaatctggtcggccgccgattcaaggaagtggtggaacacaccgccgaggcatacggcatcagcgccgacgtggtctgggatgactttcaagacccgctggtctccgatccaggtctcgccaaggccgtggcggcggatgtcaacgactacgcgcagctcgaaccgatacgtcagtcgatggcgggggaggacttctgcgaatccgccaaggtgacgttgccggtgttcgcgttcgtcgggtcaaacggccaggaaggttgcgccgactggcatagcccgcatttcgtgggtctcgacgaatccattcccaccttcgtcaacttctacgtcaacaccgctctgcgcgtgctcaacgagctgaagtaaatccttttctggctcgcctccggaggctgaggcgttaggcagacagcccagtgggctgtctgtagccgaaggtgaggcgacagccgaaccagatatgcgcgggcctcgcccgtccataagtgcaggacgagctatcagcgaagctgactgaggggagtggcattcgttcattaggtcgattcatcgtccattaggtcggtgaacggcgatactggttgttggaatcgcgccattgcaacgactgatatcgcattgcagtgacctaatgaacgcaaaaacgacctaatgaatgacgccaagccggaagaacaggcaatccgacgtcatacgcggctacactaagaatctatgacacagcttcgcttcgcactcgcccagatcgacacctgcgtcggcgcgcttgacgccaacgccgccaaggtgctcgactactcccgtaaagccgccgcaggaaacgcccaagtggttgttttcccggaaatgaccctcaccggataccccatcgaggatctggccctgcgccgcaccttccgccaagccgcatgggacaaggccaacgaactcgccacccagctcaacgacgacggcctcggcgatctgttcgtggtggtcggcaccgtgggcaccgaccgcaagacctccaagccgcgcaaccgactggtggtcttgcaccaaggcgtggtctgggctggctacgacaagcacttcctgcccaactacggcgtgttcgacgaattccgcatcttctccgccggcgaccgctccgtgaccctcgacgtggacggcgccaccattggcgtggccatctgcgaggacatctggcaggacggcggcccggtggccgacctggccaccaagaacatcgacctgctgctcaccatcaacggctcgccgtatgaggaaggcaagaccaacacccgtttcgagctcgcccagcgtcgtgccgccgaggttaacgccccggtcatctacctgaatcaggtcggcggtcaagacgacctcgtcttcgacggcggcagcttcgtggtcgacgccgacggcacgcttatcgaacgcagcccgatgttcatggaaaacctgacgttctgggacttcgattccgccgccgaacatcaggccaaggccgagatcgttccggaactcgacccggacgaagaggtatacaccgcctgcgtgctcggcctcaaggactacatggccaagaaccacttcaccggcgtgacgctgggcctctcaggaggcatcgactccgcactggtagccgccatggcggccgacgcatgcggcggcgagaacgtctggggcatctccatgccctccatgtactcctccgacggttccaaagacgacgccgccgatttggcctccaacattggcgcccattacgaggtccagcccattgagccattgttcaacgcctaccaacagcaacttgaccttgatggcgtctccgccgagaacctgcaggcccgcatccgcggtgtgatcgtgatggccagctccaattcgcgcggtctgctcgccgtggccaccggcaacaagtcagagctcgcctgcggctactcgaccatctacggcgatgcggtaggcggctacgcacccatcaaggacctgctcaagacccgtgtctgggagatcagccgttggcgtaacaaggccgcggccgcaggcgtcggcatcggcggtctcaagatcgtgggcaacgaggacggcaacaccggcatcccgttgaaggacggcgtgatgattccggtctcctccatcgagaaggcaccctcggccgagttgcgccccgggcagaaggactccgactccctgcccgaatacgcgctgctcgacaaggtgctcgccgcatacatcgagcacgcgcacggccgcgccgacctgttagccgacggcttcgaccaggtcaccgtagacaccgtgatgcgattggtggaccgcgccgaatggaagcgccgccaatacccgctgggaccgaaggtcacggccctcgcgttcggccgcgaccgccgactgcccgtcaccaacgcattcagggaataaacatatattgctcccgccagcgggagcaagtaataccgttgaggaggtaccaatgacagacgataacaagaagcagtggtatttcaacaccgtcaagaagcaggccgagttgggcatggtctcaccgatcgaacagcgcatgggtccgtacaagaccaaggaagacgccgaacatgcgtgggacatcgtggtggaccgcaatgccagatgggaggaggagaaccggcgctggaagaactacggcgtgaaacccgcacaggctcgccccgaggattgacggtcgaaaacagacggatacggttctgctgtcaatctcaagaccgaaccgctcaccaagccgctcatacgaacatcacagtatgagcggtttcccatatctggagacgtgcaatagtcccatcaatatctagaagccattggaatggtagcgttcacagaaacaatgtgagatagctcactcccaatttcagcttttctcaagcaagtgccaactacactgttgaaccaagggttccgtgaagatgcgaaacctacaaccccatttaaggagtgacatgaccgcagtggaaaatgcagctgtctcccaggaggagctcgacgccaaggcgtgggccggcttcaccgagggcaactggcagaaggatattgacgtccgcgacttcatccagaagaactacaccccgtacgagggcgacgagacattcctggctcctgccaccgagaagaccaagcacctgtggaagtacctcgacgacaactacctggccgtggagcgcaagcagcgcgtctacgacgtggacacccataccccggccgacgtcgacgccttcccggccggctacatcgactccccggaagtcgataacgtggtcgttggcctccagaccgacgttccctgcaagcgcgcgatgatgccgaacggtggctggcgcatggtcgagcaggccatcaaggaagccggcaaggaaccggatccggagatcaagaagatcttcaccaagtaccgcaagacccacaacgacggcgtcttcggcgtgtacaccaagcagatcaaggtcgcccgccacaacaagatcctcaccggtctgccggacgcctacggccgtggccgcatcatcggcgactaccgccgcgtcgccctgtacggcgtgaacaagctcatcgccttcaagaagcgcgacaaggactccgtgccgtaccgcaacgacttcaccgagccggagatcgagcactggatccgcttccgtgaggagcacgacgagcagatcaaggccctgaagaagctcatcaacctcggcaacgagtacggcctcgacctgtcccgcccggcccagaccgcgcaggaagccgtgcagtggacctacatgggctacctggcctccatcaagtcccaggacggcgccgccatgtccttcggccgcaactccgccttcctcgactgctacatcgagcgcgacctccaggccggcaagatcaccgagaccgacgcccaggagctcatcgacaacatcgtcatgaagctgcgcatcgtgcgcttcctgcgtaccaaggactacgattcgatcttctccggcgacccgtactgggcgacctggtccgacgccggcttcggcgatgacggccgttcgatggtcaccaagacctcgttccgtctgctcaacaccctgaccctcgagcacctcggacctggcccggagccgaacatcaccatcttctgggatccgaagctgccggaagcctacaagcgcttctgcgccaagatctccatcgacacctcggcaatccagtacgagtccgacaaggaaattcgtagccactggggcgacgacgctgccatcgcatgctgcgtctccccgatgcgcgtgggcaagcagatgcagttcttcgccgctcgcgtgaactccgccaaggccctgctgtacgccatcaacggcggccgcgatgagatgaccggcatgcaggtcatcgacaagggcgtcatcgacccggtcaccccggaagccgacggcaccctggactacgagaaggtcaagaacaactacgagaaggctctcgaatggctgtccgagacctacgtcatggccctgaacatcattcactacatgcacgataagtacgcctacgagtccatcgagatggctctgcacgacaaggaagtgtaccgtaccctcggttgcggtatgtccggtctgtccatcgccgccgactccctggctgccatcaagtacgccaaggtttacccgatctacaacaaggacgccaaggacctcgaaggccacgagtacgagtacgtcgagggcgctgatgacgatctggtcgtcggctaccgcaccgagggcgagttcccggtctacggcaacgacgacgatcgcgccgacgacatcgccaagtgggttgtctccacggttatgggccaggtcaagaggctcccggtctaccgcggcgccgtcccgacccagtccatcctgacgatcacctccaacgtcgagtacggcaagaacaccggttccttcccgtccggccacgccaagggcaccccgtacgctccgggcgccaacccggagaacggcatggactcccacggcatgctgccgtccatgttctccgtcggcaagatcgactacaacgacgctcttgacggcatctcgctgaccaacaccatcacccctgatggcctgggccgcgacgaggacgagcgcatcggcaacctggtcggcatcctggacgccggcaacggccacggcctctaccacgcgaacatcaacgttctgcgcaaggagaccatggaggacgccgtcgagcaccccgaaaagtacccgcacctgaccgtgcgtgtctccggctacgcggtgaacttcgtcaagctcaccaaggagcagcagctcgacgtcatctcccgtaccttccaccagggtgccgtcgtcgactgatgaccaaccccgcgaaccgcggcaatgactaactgaaggggtggggcacggctccaccccttccttatttcccacagactttcgcatcatttggaacaggaggacaacgatgcccgcaacacccacgttccgcaccacgaccaggcatatgctcaaggaatcgaagacctatgcctcgcagactttgatgggtggcctttccggctttgaatccccaatcggactcgaccgacgtgaccgcctttccgccctgaaatccggcgatatcggcttcgtccactcttgggacatcaacacctccgtggatggaccgggcacccgcatgaccgtgttcatgtccggctgcccgttgcgctgccagtactgccagaacccggacacttggaagatgcgcgacggcaagcccgtctaccttgacgccatgatcaagaaggtcgatcgttacaaggacctgttcaaggccacgcatggcggtatcaccttctccggcggcgaatccatgatgcagcccgccttcgtctcgcgtgtgttccatgccgccaaggagatgggcgtgcacacctgcctcgacacgtccggcttcctcaacacgagctacaccgacgagatgctcgaggacatcgacctgtgtctgctcgacgtcaaatccggcgacgaggagacctatcacaaggtcaccggcggcaccttgcagcccaccatcgattttggccagcgactggccaaggccggcaagaagatctgggtgcgatttgtgctcgtgccgggcctgaccgactccgaagagaacgtcgaaaacgtggcgaagatctgcgagtccttcggcgatgccgtcgaacacatcgacgtgctgggattccaccagcttggccgcccgaagtggcacgaactgcgcatcccatacccgctggagaaccagaagggacccaacgccgccacccgcgaacgggtggccaaccagttcaaggaccacggcttcaccgtgtattaaattgcagggccgaaccgcgcgtaaataccacgattcggcccgttcgcccataccctagagatatggccgacatctacgcatttcctacgggagagtccaacgacggacgccccgtgcgccctcagggtgtgccggatgaagtatgggcagccgtcgaatccgtcagcaccatgaagcgcatccatgacgtgcgctatcgggagattcccgtgccttccaccttggccgattatggtatcggcgtggaattcgaagcgggagagcgtgccctcggcgatgccttttccgccggtcttggcagcgatgccgaaccacgaatcgccacaggctggatcatgatgctttatgctcatgagctgcgcattgactgggattccaactggcgttgcgtggcgttcgcgcgactgccgctggaaaccgccgaaaacgattctctgacccccggcatgtactgggatgacatgtgcgactatttcgacggcatcgagccggattcggtatccggcacagtcaccgtgacccagaacacggcttttggctcgatggccggctccaccagcgccgggtgtgagattcgcgtctcatggaccccgcttgacgggaccgggccggacggtactatggacgccggcgcacaagtccgctcgtgggccgcattcatcagatccaccatccgttttgaggaggatgacgccagttgagtgacgtccgtgacaccgaaccccgactgctgaaagagcctcgcgggggagtacccgatgtcacttcgacgctggacggctatcatcgtgtctgcgatgcgatggccgaggcgacgggctcgctggccgccgacgccgaacgggcgtccggcttccgctatggacacgaggattggctgattcagttcaaacgtgagggtgcaggcatcgccttgcttgatcccgtcgccctgacccgggccggagctgattggaatgaattcaatgacgccgtgggcgacgccacgtggattctgcatgattctctgatggacttgcccggattcgccgaaatcgggctcaaacccaaagccctgttcgacacggaaatagcggcgcgattgctcggcctgcaccgctttggtctggccgccgtcaccgaacactacctcggcatcacgctagccaaagagcattccgccgccgattggtcctaccgtccgctgccgcgcgactggcgcaactatgcggcgctcgacgtggaggtgcttatcgaacttgaaaccatgatgcgtcgtgacctgaaagccgcaggcaaggacgagtgggccgctgaagagttttctcacgctttggttgcgggccttgccccgcgcaaaccgcatccgattccttggctgcgtatctcgcgcatcacccagctgagtcgtgatccaaggggcttggccatcgccaaatccctatgggaggagcgcgaccgactcgcccggcaatacgatattgcgcccagcctgttattggccgattcatcaatcatcgaggcggcgaccaacaagccgcacaatgctgcccaattccgcgcgctccgatccctgaacgagcgtgtgcgcatccataccggcaccgagcaggacaaaatgttcgagcggtacgcgccgattcagcgtgcggtcaaaccgaaggtctggaagcaggccatcgatcgagccatagccctgaagcccacccaatggcctaccatgcccgcccccgaacaggacgaaaacggtgtggtgaacgcgccccgatccatgcggctgtggcaacagcgccatccggagcgttatgaccgtctgcaacgggtgcggcgtgtgatcaaccgcatcgccgaagacacccgcacgccggccgagatgatcatcaagccacagatcctacgcaacctgtgctgggtggaagacccggtggaagtggacgtcgagacgttcctgatcgagcagggcgcaaggaactggcaagtgaaactcattgcaccgtccgtaagtggcgttatcatgtagaggttgccttacggcagaactgtaagaaataacgacttttgaggagtcattagcgtgaagatcagcgttcgtaacctcgagcccaccaaggtgaagctcaccgtcactgttgaaccggaagagctcaacccgtatctggatgcggcccgtaaggaaatcgccaagcaggtgaacgttcccggcttccgtaagggccacgttcccggcaagatcatcgaccagcgcatcggtttcgccgccgtcgccggtgaggccgtgaacgacgcggtcccggagctgtactccaaggccctggaagagaagaagattcgtccgatggctcagccggagttcgacgtgcaggatgttccgcagtccgccaacgacgagaccaagctgaagttcaccgccaccgtcgagcgtcgtcctgacatcgaactgccggaaatcgacggtcttgagatcgccatctccaagccggaagtcaaggatgaggacgtcgacaagcgcctcgaggccctgcgccagcgcttcggcaccttggtcggcgtggatcgcccggccgccaagggcgacttcgccaacatcgacctgactgctgagattgacggcgagaccgtcgactcccaggaaggcgtgagctacgagctcggctccaacaccatgctcgacggtctggacgaggcccttgacggcctgtccgccggcgaggagaccaccttcgaaggcacgctggaagccggcgagcacgagggccagaaggccaccgtgaaggtcaaggtcaactccgtcaaggctgaggaactgccggagctgaacgatgagttcgcttccgaagcttccgagttcgacactctggacgagctcaaggctgacatccgcaaggctgccgctcaggacgccgaaggtcgtcaggccaccgaggctcgcgatgccttcatcgccaagctgcaggaaggcctcgagatcccggtgccgaagggcgtcaaggccaacatggtcgaagagcagctcaagggcatgaccccggacccggagaaggccaccaaggagcagaaggctcaggccgaggagactgtggagaaggatctgcgcgatcagatggtgctcgacgctctggccgagaagctggacgttcaggtgtcccagtccgacgtgttcaacttcctcgcttccatcgcccagcagtacggcatggatccgaacaacttcatccaggccatcatcaagaatggccagcttggctccgctgtgcaggaagtcggccgttccaagggcctgctcgccggcatgcgcgccgtcaagttcaccgctgatggcgaggttgtggacctctccgccttcctgggcgaggccgctgaggacgaagagtccgagtccgtcgaggccgcttccgctgctgccgccgtggccgacgaactgtccgccaaggatgacgccaaggatgctgagtgagcatagcctcatcgcgttagcgtgattgtttgagcccggaatcgtgtttcatggttccgggctcttcctattctggcaaaaggactatttctttggctcccctctttgaggggagctgtcgagcgtggcgagactgaggggagttcccaaggcatactcgttgcatagggtgcggaggttgacatgcagccaacggttactatcaaacgccttggttggctcgctgcggcgaccattgtgctcggcgtgctcatcggtgtgggagcaggtctgctgaccctgttgctctacggcgttgaacatgtgctgctcggctacatcgaaggcccagaattgtctggtccattcggcgtgcccgctgcacgccgtgcgatatcggtgaccgtgggactcagcatcgcaggcattatctggtatctgctgcgacacaaaacgactgcggtgccctcagtcaagaaggccgtggcaggaaagcgaatgcctttctggcaaaccattgcgcatgtggtattgcagattttcatcgtcggctccggtgcctcgatcggccgagaagtcgccccacgcgaactcggcgccatgctcgcgcaacgtttctgcgacctgttccatatcgagggcgttgacggcatcgaccggcgcatggtggtggcagtggctgccggtgccggtctaggaggcgtctatgacgcgccactggccggcatgttcttcgccgtcgaaatcctgttggtagatgtgacaatcgaaaaagttgcgtttggactgggcatgtctgccattgccgcattcgtggcggttgcgatcaaagggcatcacctgttctacgacattaccgccatgcaaccggaatccacgccaacgttaatggtgttcgctctgatctgcggtgcggcatgtggagtgggcggcgcattgttccgaaaaggttcgcaatgggcggaagcgcacaagccaaccggtaaggctattctgcggcagatgccgctggctggtctcatcaccggtttggtggcgattgttgtgccgcaggtgatgggcaacggccgtgccgcagcgcaacttggattcagcacattcattcctgaaaccgccggcactgctggtgccatgcagtcggcatcttcagcggccgcctctccatggaacttgctgacgggcggcggtaatgtatccggttcggcctctggcgggggagcgggctctggaatggcatcgttctgggccatgcttcagggtgggagcggcccttctggatccgtgatgaacgccggtttcccgctgtcccagtccaatatctggatgttgctgggtgtgttggcactcacctttgttgccaaagcgctggtgacgctgatgaccattcgctccggtgcgtcgggcggtgtgctgcagcccggcatcgcattaggttccacgctgggtgcgatgctcggcctcgtatggatactgatgtttccgaccgattcggtaaccgcgtgtgccttgatcggtgcggcttcgttgctttcggcctcacagcaggcaccgcttatggccatgtgcttggtgatggagctctctgaagcgccgattaccttctttgtgccggtcggcatggccgtggccacgtcgtcactgatatcaaagtggttgctgagtcgtaagtaagtaaatacatatattctggctcccctctctgaggggagctgccccggtcgaaactcccctcagccgcctatggcgacagctcccctcagagaggggagccgaggtaaagaaagctatgtcagaaaatacagaaattcgctcggcacttgaatcgcttgccgctgagccgctcactgagcagattgactactatcgaaagccattcatggtgttatgggccgccattcaggaggcagccagcgatgtggccgaagactacgacttacctgcggatatggcccaattatgggtggccgaacagatgcgccaagtcgccgattcactggtcgatcggctcgcggaaaaagccgtggcccatggggccagcaagtccaacgtagcgcgagccgccggtgccagccccgccaatgccgcccgtcgcttcccgcgtctgggcgacgatgccgcctcccagacccgcctcctcattgacgacgtcctcgataccttggaataaccgaaatccctacgctgcccgccaaaaagcacgcgaaaagccgccttcagtcgcttcaaggcggtagtctgaacaatgttcgagtaattagaaggagaatcaaggtgagcaatacctttgcgaccttgccggtcatggcgggcgatgacgtcccggccggccccgtcgacccgattttcaaccgtctgctcaaagaccgcatcatctggatgggtgaagaggtcaaggacgatatggccaaccgcatctgcgctcagctgctgatgctggccgccgaagacccgaagaaggacatctggctgtacatcaactcgccgggcggctccatcaccgccggcatggccatctacgacaccatgcagctcatcgagcctgacgtggcgaccgtgggcctgggcatgtgtgcttccatgggccagttcctgctgagctccggcaccaagggcaagcgttacctgacctcgcacgcccgtgtgctcatgcaccagccttccggcggcatcggcggcactgccactgacgtgcgcatcaacgccgagctcatcatggacatgaagaagaccatgagcgagctgaccgctgagcagaccggccacaccctcgaggaaatctaccgcgacaacgaatacgaccactggttcaccgcccaggaagccctcgactatggcttcgtggacaagctcgtgaccacgccggacaccatcggcaacaaccagcagggggagtgagactcatggcaagtgaagaagcaaagttcgccgcccgtgccgaccgcttggccggccgtcagggcgtagccggtttcatgccggcctccgcccgcgcagcccagcccgcgccgaccaaccgttacatcatgccgcagttcgtggagaagaccccgtatggcatgaagacccaggacgcctactcccgcctgttcgaggatcgcatcatcttcctcggcgtgcaggtggacgacgcctccgccgacgacgtgatggcccagctgctggtcctcgaatcccaagatccgaaccgtgacgtgatgatgtacatcaactcacccggcggttcgatgacggccatgaccgccatctacgacaccatgcagtacatcaagcccgacgtgcagaccgtgtgtctcggccaggccgcctccgccgcctccattctgctggcctccggcaccaagggcaagcgcctgatgctgccgaacgcccgtgtgctcatccaccagccggccatcgaccaaggcttcggcaaggccacggagatcgagattcaggccaaggaaatgctgcgtatgcgcgaatggctggaggagaccctcgccaagcacaccggccaggacgtcgagaagattcgccgcgacatcgaagtggacactttcctgaccgctcctgaagccaaggaatacggcatcgtggacgaggtgttggaacaccgccagtaaaacttccggacattgcaataccctcggtcggcaacgaccgggggtattgtatttcaaggatggcaatgataatgcgcagcgtggcggttcgacggtgcggcgcagtcggcaaaggagaatcatgggacgtgtggtgagctacaacgaggacgtaccccgttgcacgttctgcggcaaaaccgaacatcaggtacgaaaactggtggccggtcccaacgcctccatctgcgatgaatgcatcgccctgtgcgtggacatcatctccgaggagcgtgtcaaagatgccgaggtcaattcgctgagcctgcccaagcccgctcagatcttcgattatctcaaccgctacgtcatcggtcaggagaacgccaagcgcgcattatccgtagccgtatacaaccattacaaacgcgtcaatatggagcttcaggagtccgctgagcagcttgacgggaataacgggcacagtggacagaccagcaaacaagccaagcaatccgttcccacccagacgcgtgctacccgccgcagcaatgaccctttggctgacgtcgaggtcgccaagtcaaacattctgttgctcggccccaccggcgtgggcaaaacctatcttgcgcaggcgttggcccgcgtaatgaacgtgccgttcgtcatcaccgacgccaccaccctgaccgaagccggctatgtaggcgacgatgtggaaaccgtgctccaacgtctcctccaagctgcggatggcgacgtaagccgagcccagcacggcatcatctacattgacgaaatcgataagatcgcccgcaaatccggtgagaacacctccatcacccgtgacgtgtccggtgagggcgttcagcaggcgttgctgaagatcttggaaggaaccatcgcctccgtgccgttggagggcacgcgcaagcataaggagcaggacgttgcgcagatggacacacgcggcatcctattcatctgcggcggtgcgttcgtggggctgacggacattgttcgcaagcgattgggccgtcgagagaccggcttcggcgcgaattggcatgacgccgacatgaaagacgaggaattgctcgaacaggtcaatgccgatgatctggccgagttcggactgttgcctgagttcatcggacgtttgccggtcaccagtgtgctgaaggaacttaccgtagacgatctgacggcgattctcacccagccagccaacgcgctgatcaagcagtaccgtaaactgttcgccgtcgacggcgtcgatctgcaattcacagaacaggccattcgggcgattgctgatatcgctatcaagcaagggaccggcgcacgcgggttgcgttcgattatcgaacgtacgttgcaggacacgatgttccagttgccgagtttggatgatgtgaggcaggtgattgtggacaaggcgtccgtagagggttccagcacgcccaaactcctgcgcgaagccgtggatgtgccgcagggacgtctcaaggttgcgcagtcggttttgcttgaccgagttcgtacacacgaggcgtgaggccagtaaatacgccgttgcggtagtggtcgggatggtgcgactcgccgcaacacgccgagttgcattcagctgaacggcgtgtattatatatcgagttgtctgaaagacaacatgcgccagtagcccagcggattagagcagctgactacggatcagcaggtcgcaggttcgaatcctgtctggcgcactcccgaaccacggggacaacagtggtatgcgccagtagcccagcggattagagcagctgactacggatcagcaggtcgcaggttcgaatcctgtctggcgcacagtaagcctcgaaagcgaaatgcttccgaggcttttccaattgtattggtccgtttgagtcggttgagtcggccacacagggttgggctaaggttgcccttcgcgactcagcccggagcggaacgtcctgagatattccgtactattacatacggttcatccaagagagtgcagcaaggagacgcgatggccacgaccgccggcgcgaagaagggactttggtccaccatcaggcgaatcgccgcctcagaccgtatttccggactcatcatgcttggcttcgcgctcaccggcctggtgctcgcgaatctgcccgccaccgcgcatgcgttcgagaccgtagcggaaacgcatctgttcatcccctacaccaatctcgacctgcctattggccactgggcccaggatggtctgcttaccatcttcttcctgaccgtgggcctcgaactgaagcaggaactcaccaccggctcgcttgccaatccgaaagcggccgccgtgccgatgctgtgcgcggtgggcggcatgatcgccccgcccatcctgttcctggccgtcacggcattgttctctcagatcgggcctggtgaacccggcacgctgattctgaccaccaccggcagcagcatcccgttctcggagatgtcgcacggctgggcagtgcccaccgccacggatatcgcgttctcgctggccgtgctcgccctgttcgccaaggccctgcccggttcgatccgcgcgttcctgatgacgcttgccaccgtcgacgacctgctggccattattctgatcgccgtattcttctcctcgattaacgcctggtattggttcatcggcatcgccgtatgcgccgccatctgggcatacctcgtgcgactgaaaaaagtgccatggaccgcggttggcatcgtcggtatcctcgcttggatcatgatgttcgaggcaggcgtgcaccccacactggccggcgtgctggttggcctgctgaccccctctcgtgaaatgcacggcgaactctcgccgcgtgccgaacgctatgccaacaagctccagccattctccgcactgctggccctgcccatcttcgccttgttcgccaccggcgtgcacttcgagtcgatgagcccgctattgttggcctcgccgctggtcatcgcactgattgtggctttggtggtcggcaaacctctgggtatcatcaccaccgcatggctgtccacgcatgtgggcgggctcaagatggccaaggggctgcgtgtgcgcgacatgattcccgctgccgtcgcctgcggcattggcttcactgtgtccttcctcatcgcttcgctggcgtacaagaacgcggaactttccgctgaggcgcgcttcggcgtgctggtggcctccctgatcgccgccgcgatttccggtgtgctgctgagccgtcagtccaagcgattcgagaagaccgcagccgcagcagcggctgatgcggaggatgacgaatcgattgatggtgatggcatcgggcagccaagccacaccacagagcccaccacgcccacggaacaccccggcaccctcgccgacggcaccgccagtgtggaaatcgacttccgccactgatggcttagacggtccctactccattgttggccttgtttcgtgaaaaccgtacgctgagacgcgctcagtgtacgttcttcacgagatgaggccttatttcgcggaaaacgtacgctcagtgtcactcaccgtacgttcttcacgaagtcaaggatgatttcgcggaaaacgtacgcagagcttcaggcgctagaatgcgaagagtcgatagcgccgtacaggaggacattggatggcaaagaagcagaagaaatccaagaagaacgacggcaaaaaggccgctgaagcaaagaatctagccgaggccgcatccaagtccgcagtcgtggacgatatggaaccattggaagccacagccgcgaatgatgcggcggcgttggaggctgagacggcaactgaggctgtggccacaccggtgaactcggtcgatctggaggacgcctcgccgctgggcgacacctatcatcgcggcccggtgattctacgcggccagatgattccctcggacaacaccaccgccaacctgctgaaatccgatcaggacaccgactggctgcacatggacccatggcgtgtgctgcgcatccaatcggaattcgtggacggtttcggggcgctcgccgagctcggacctgcggtctctattttcggctccgcacgcacccagcgcaccgaatcgatctacaaggcagcacggcgcatgggtagccagatagccaagcgcaacatcgccgtcatcaccggcggtggtcccggcatcatggaagccgcgaataggggagcggcactggccggcggcaaatccgtgggacttggcatcgaattgccgcacgagcaggggttgaaccagtgggtgaacctcggcatgagcttccggtacttctttgtgcggaaaaccatgttcatcaagtattcctccggcgtgatcgtatgcccgggcggcttcggcacactggatgagatgttcgagctgctgaccttggtccagacccacaaggtggcgaatattccggtggtgctctacggcaaggaatactggcaggggctctttgactggctcaacggtccggtggccgagcacggcatgatctcgacgatcgacccgaaactggtcaccgtaaccgatgacgccgacgaagccgtggacgtggccgtcagcgcaattgtgaggtaagcgagatagagtggctcccctctccgaggggagccaaggacagagttattttttgtaggcgatgagcaggccggtgccgtcaggggtgagcgtggactcgaaaccttcgtcatcttcgacggtggtgagcagctcacgcatggcgatggccttgtcgctgcggtcggccggattgatcacgccgccctgaccgtcctccaacgccagcacatcggtgaacacgatcacgccgtgcgtgcgcagcagacgggaggcctgggcgaacgtggcggcatagttctcggcgtcgcccgccaccacgatcagatcgtaatcattggcgttgaggcgcggcagaaacacgctggccggggcgttcaccgcacgcaacgtggtgtcggtctcatcctgcagctcggcgaacgccttgcgaatcagcgcgatgccctgagcggtggaatcgaccgcagtcagcaggcccttgttatccagcgcatgggcgagctgcaaggtctccaccagcgagccggtgcccacggcaatcaccgaagcggcgctggtgatgcgcaccagcatgcccagcagacgggcctgcgccgccgaaccctgcaactggccggactcgtcggcggccgtacgggtgtcggtcaacgcatcggattcacgttcgcgcgcgtgttcctcggtgaattcccatgccttggcgaggttggtgtactgcgttctgtccataattcgttctttcatgtcttctctcgtgcgggcacccggcggatgcatcgacgcatgtgcttaggcgatcgccgcagccagccgcggcgcggcttaacgctcgcggaccttagccacgatctgccacatctcctcgcccacatcgatgccgcgcgggcagtggcgggagcaggcgcgcacggactggcaggcggccacgccgtcggcggtgtcgatggcatccatacgctccatggccttggtgtcgcgcgaatcgttgacgaaacgggaggcccaaatcagcgcggccgggccgatgaaggcgtcgccgccggcgtacaccgggcaggcgccttcgcacacgccgcaggcgatgcagttgctcagcagctcgtatttggcgagttgttcggggttctgcaggtattcgaacacgtccaccttgccttcggcggtggtggcgagcacgccgtccgcctgaagatacggggtgagcttcctgatctggttgagcatagggtcgatgtcggcgatgaggtcgcgctgcggcgggaagccgggcagggacgccagttcgatgactcccagcgaaccgtttgcggttgagttctggccggtcgccgcgtttgcgacgttttccgcggaatcgtcggattcctcagtctcggtgccggtgtgtcggaacccttcgtcatcgacttcgagcatggcgccgggttgcttggcccaatcgcggatggtggctgtgcacagcagggtgggggtgccgttgatggccacggcgtccgaaccgcacatgccatgaccgcacgaataacggaaggccagcgtcgggtcgacggtgcgtttgatggtcagcaggcagtcgagcacggtgtccgaggggcgtgcgggaatcgtgtactcctgcacccactgcttgccgcgtggacgacggcgcgccgccgaatccgagccgccgccgaacggggagcttttcttggcgaacgggctgccaccgcgtgcacgttcggcacgctcgggtcgcggcgtgaaacgatgcacttgcagggtaaccgtcgtgttgctcgcctcagccatgttctgcctccatgaaacagtgggatatcaagtccagtattagccaacctattgtgccacaagccctaggcggcttggatattaccaccagcggatcagtactcgcgcttcttgggcggatagtcggtgatgtgcaccggcttgaaacttaccgaaccatcatcggcgaccatcgagtgagcaaggaaatgctcatcgtcgcgttcggggaaatcaaggcgttgcatggatccgcgagattcctgacgggattcggaagcgtgcagcatggcctcggccagttcgatcagatgacggacttcccagatggcggtgacctcctgattgaaagcggcggtcttgtcatgggtccgcaaggtatcggcaaccggtgtgatgtcgccgttgatctgggtcaacgccgtatcgatggtctgagcggtgcaacgtacggccagagcctgctccatcactgatccgagttgggccatgagctgataaggattggcggtgggcactccatcgtctgaatcatctattggtccggcgagcagttcgtcaagctctgctttgcgagaatcggcagcctgatcggcggcatcggtcagcatgtcatcggccgaatcatcggccatgggggagtcaaccgggttctcggcgatgcgtgcggccatcgtctgaccagcgcgtgtaccgaacaggcaggcgtcgagcagagaattgccgcccagacgattcgcaccatgtacggagacacaagagcattcgccagcggcgaacagtccatcgactacctgcacggcaccgtcggcccaacggtacacctcgccgtcggtggtgatggggatgccgcccatcgtgtagtgtgcagtgggcttgatgggtactaggtccttggccggatcgaggttcgcgtactgctcgatggtttcgaccacctgcggcagcacttccttcatacgttcggggtcgatgccggtcatatccagccagacgcagtccttcggaccatccgggtccttcgggtcggcgacgccgcgaccggcgtcgatctccgccatgatggagcgggagaccacgtctcgtgcggccagatccttatgctccggagcgtagcgttccataaacggctcaccgtcggcgttcctcaggatgccgccctcggcgcgggccgcctcggacagcaggatgccggtgtgcgcgagcccggtggggtggaactgcacaaattcgatgtcctccagctgcagaccggcggccaaggtcaaggccatgccgtcgccggtcagatcccaggaatttgacgtggtgtggaacagtcggcccgcgccaccggtggcaagcagcacgttgcgcgcgtggatggcctgaatcttgcccgaatgcgtgtcaaaggccacgatgccggccgcctgcttgccgtcgtcggcgagcaccaggtcggtcacataccattcctcggcgaactcgacgccggcggccacgcactgctgccacaaggcgtgcagaatctggtggccgatgcggtcggccgcataggcggcgcgcttgaccggggcgccgccgaactcgcgcgtgtggccgccgaaccggcgctgggcgatatgcccgtcctcggtacgggagaaggccacgccctgacgctccaggttgatcacggtctgcggcgcgtattcggcgagcagtttggccgcatcctggtccaccagccagtcgccgcccttgatggtgtcgtagtaatgccagtgccagtcatcggactccacattgcccaggctcgcggcgatgccgccctcggctgaaccggtgtgcgaacgcagcggctgcagtttggagaccacgaggatcttcgggtccacgccttgttccttgagctcggtgatctcgggggagcgcagcagtcccaacgccgccgacaggccggccgctccggcgccgacgatcaccgcatcatacatatcttccaaacgtttcggactcatgggttcgattctcgcacacccgccgaacagccttcgagccgtgtcatggaagccgattagccgacacggctgctcagcttgagcatcccggcatcccgctcgatcactcccttcagctccaatgcgccgagtagctcaagtatggtgccgatattgggaatctcgtcgggtaccgtctctcgcgccacgcgcaatagtgcgtccggggtgacgatgagatgtcgtttacggcattcacgaatcaatgccactaatatgcgttccatttccggcagcttggcgataatgatacgttgttgggcttccttctcgggatcgggcttcggcttgacacgaagatccggcatctgatgcgacgagggcagctcttcacccttgcttttgtcgttaccggaatcggcggttgcgctcgccggcccatccttggattgagtgcgcgtaggctgagtatgcttggtcttcgaacgtttcgaatgacctgaatcttgtgacgactcctgtgacgccgatgattccgaggatgctggcgataacggagtcgttgccggcacttccatggcctcctcgttttcgggcgagtcctgacctgtggatttcgatatgcccgggcatactgccataacgggtttgtgccgttcatggcatatatcctcggtggatgtggcggcacacagaatcatcgctcggtggtcgccgatcatcttattgcacccggcgttgcaaggctgattgatgtcaccgggaaccgcatacacttcgcgcagcaattcgcatgcccatcccgcggtgttgagcgctccggaacgcaaccgggcttgcgtcacgatcaatgtggaagacatggccgcgataatgcggttgcgaagcagaaaacgacgggcttcgggaatcgtcccggggcacagttcgctgatcagtgcaccgccttgcgcctcgatacgttcgaacagcgtgcggttacgcatcggtccgatatggttgagcccgccggcgaatacggcaacggttctgcccacattggcgggcattctgccgtgcagcgcattcaacgctccccaatgtgccgccgcatccgtgcccatcgcgcctccggacacgaccagatgcccggcaacggctgcctgttcggctacggtgtgtgccacataccggccatattcggtcacgtcccgtgaaccgacgatgccgaccggtttggcgcaactggtcaatgcgcgtggatcgcctttgatccacaaacacagcggtggcgcccaatcggagcgaatggacaggtcggccaactgcgagggccaacatggatggccagggccgataatccattgcgtgccatccatagtgaaccagtcggccagttggatgatgtcttgcgagggcaggtccatcatgcggttatgccagccggccagtgcattgcggaaggagcgcatcgcgttcgccgacgccttgcggccccatcgagtgaggccgtccacgaacatgcggtcaatacgtgacagcgccgggccacagatttcagatggctggcttgggtgggattgcgccaacgcatgccagagggattcggcgttttccgcgcctttgagcgcggcgtacatcatcacatccgcgccatcaagacagaacgtgagcgcggcacgatacaacgtatccgtaggaggtacgggaatggtgcgcgaaacagcgagacccgtatcggtgtgatccacactttttgcggtgccgccagattgccggatatcagtagcgttactcatgtcatcctcgttctcatttcgatgccctgatggacgtcctgttcagtgggtgatacgcggccggccagatcggcgagcgtccaagacagacgcatggcgcgatcagccccgcgcaatgtgagttgatgattggacagggcccgattgaccaattccatcgctttcagcgatgtattggcgtgcagccatttgcccgaagcttgcgcgttgcacacccatccatactgtctgaaccgatctttggccacttgacgggcacgaatcacacgagcttgtatcccggcactggactcgccgattggctcgctttgcacggcaatgcgcgagactggtggcaccgccatctgaatatccacacgatccaatatcggtccggacaatcgcgagaaataacgtatacggtctttttcccggcaagcgcaacgttcgccggtgccgtaatagtatccgcacggacaggggttggccgccatgatgagttggaatgaggccgggtaataggtgctgccttttgaacgggaaagcgccacatacccggattccaatggttcgcgcagcgtctgcagggcgcgtgcgctgaattccggtgcctcgtccagaaacagaatgcctcgatgcgcgcgcgtgattgcgccgggaacggcgatgccgctgccaccacccaccaaggccgccgtgctggcggtgtggtgcggtgcctcgaacggcggcatgtcggtgatgccgtactgaggcagtatgccgcacagcgatcgaatcgatgccacttccagttgttccgcctcgttcaacggacacatgatgccgggcatacgtgaggccagcatggttttgccgctgcctggcgggccggtcatgatgagattatgcccgcctgccgccgccacttgcagcgcccatttggcatgctcctgacccagaacctcgttcatatcgccacaatcgttgggatgacttgtgggcgattgatccgtggtggtctcgtcggtaaccggtgtatcgggaatcgtataggtggcatcgccgcccatcagttcgatgagctcacccacatgcctcacgcccactacatccagtccacccaccatcgaagcctcgtcaagattgcgatggggaacaatcattttgcgcacgccacgttcctcggcatgcagcatgatcgggagcagcccatgaatcggcagcaccgagccgtcaagattcacttcgccgagcacaatggtatcttctaggcaatcatgccctatggcacccgccgcacataggacgctggccgcgatggccagatcatgcgacgaaccgcgtttgggcatggccgcagggctcatgttcacggtcacacgggtttgcggccaaccgaatccagtggcttgacacgccgatttcacgcgctcgcgggcttcggacaacgatgcatccggcaatccgatgatgctgaagtatggcaagccagggctgatgaaagcctgcacttggacgatgaaggccttaaggccgatcagtccgactgagagggtgctgccgatagccatgtctactcctttcacaatgtgtttcgcaacgtggctgtttttgggggggggggcttcagaaggcattttcaatgtgatgcacgagcggcctgcccacccgaagcacgatggtgacgacatcgaaacggaccgccgaatgcggcacacgattacgccggtcaagtagccaatcgcaggcggctttcctgagattgtgctgtttcgccggcgtaatggcctcttgcggatatccgtaatgcatggaccggcgtgatttcacttcgacgaacaccaccgtgtactcgggattgagcatcacgatgtccaattcgccgtaacgggtatgccaattgcggctcaaggtcgtccaaccgtgttcctccagccacgcggcggcatactgctcgccgagcgcgccgaactgtttgggcgtcagattgcggtcgcccatcgtggccgcaatccgttccgaaggcagcattgcctgcggatcaggtgaagccagcatgggctggtgaaaggcaagaccggcgtcgatgccggacttcgtcgtcggctgggtaggtggtaaagcgttcatgattccactgtgcgggttacttatgtaagagcacaagcgcaaccggcaaatgtggatactatgacgcggtttggcgtgttgtggataacgtgtggatgaaaacccggttatccaccattagttcagaaggtttaccaaggctcaccagtcgacttccctgtgacgaaaaaacaacccatcggattgttcgctgaatacgtcagacccagtgagcggagaggggagccaaggtgcggtcacttcaccaaatcggtgagttcgccaaggttcagttcgaaactgacgccacgatcctcgaaatgcggctggttacgggtgctgaccatggcgtggcgcacgaactcaccggcgatttcggccgactcggccaggccgcggccggccatcaccgcgccgcacagggcagaggcgaaggcgtcacccgtgccatgaatcatgtatggcaacttctcatgagccagctcgatcttgccggcaacaccagtggaagcgctggccacatagttgacgattttgccatcgccatggtcgatgcccttcagcaccacgttcttggcacccaactccagcagagcaccaagcagctcgttaaccgtggcctcatcaatatcctggccaggatagtcacgcttggtgagaatgcttgcttcggtgaggttcggcatcaatacgtcggcaccatcggccagcgcgcccattgcctcgcacagctccggtgtgtacgtggggtacatttcgccggcgtctcccatcaccgggtcaaccagacgcagcgcgttcggatattcgcggtagagacgctgaatgattgccacctgatcgggggagccgaggaagcctgaatacacgccatccagctccacgtcttccttctgccaggcatccaagtaaccggagagaatatccgtggtgtcatggaacgtgaacactgcatagcgcgtgtgcgccgagaacagggcggtcggcaccgggcacacatcgcagccggcggccgagagaatcggaatcgcggcggtcagcgagcacttgccgtagccgcacatgtcgtgcacggcggccacgcgcggaatatagttcggatcacggtcatacagtgttacatcggtcatgtctgttcgaatcccttcaccatgttggcggaataattcattggcgatgtttgactgtagtcgttcgtcatgtaaaccatgtaaccgggcggcagaaaaatgaaacagacgtcatcaccgagcgggcaaaccgtcttggtgacgggtggaacaagcaatcatcacggacacttgagccatgcgcgaaaggcatggcagcgatatcaccgtgaccgcagtcgaccttgaaagcgcatgcgtgcggcccggcgtgtcgcgataatttcaacgactttttcgtgacttctgacagtcgctcacgtcaatgatcccaaggctttataagcccttataggcaagtccgataacgttcagcttgcgccgtgcggcccaagcgtcgtaacttcataaccaacacctcgccaaccgcccgaacacggcaggcgggtggcaaggaaaaatcctcgcgacctagcacaaccaaggagaataccatggccgagaacaacaagaagtaccgttttgaaaccctgcagctgcatgtgggccaggagcaggccgacccggccaccgattcccgcgccgtgccgatctaccagaccacctcctacgtcttccacaacttcgatcacgctgaggcccgattcggccttgccgacccgggcaacatctacggccgtctgaccaactctacccagggcgtgttcgaagaccgtatcgccgctcttgaaggtggtaccgcaggccttgccgtcgcctccggtgcagccgccgtggaatacgcggtgcgcaacatcacccagtccggcgatcacatcgtcgccgccaagaacatctacggcggcaccttcaacctgctgcgccacactctgccgcgcgacggcatcaccaccaccttcgtttccgctgagaacccgcaggagttcgaggatgccattcaggagaacaccaagctcgtctacttcgagaccttcggcaacccgaacgctgatctgccggacttcgaggcaatctccgaaatcgcccacaagcacaacctgccggtgattgtggacaacaccttcgccaccccgtacctgttccgcccgctggagcacggcgccgacgtggtggttgaatccgccaccaagttcatcggcggccacggcaccactttgggtggtgtgattgttgaaggcggcaacttcgactggaatgcggttccgggcaagttcccgaccctgaccgagccggacccctcctaccacggcctgaacttctatgaggctctcggcggcaccgccttcgtgacccgtatccgcgccatcctgctgcgcgataccggtgccaccctgtccccgttcgccgcattcttgctgctgcagggcaccgaaaccctgtccctgcgtgttgagcgccacgtccagaacgcgctgaaggtcgtcgagtacctgcagaccgtgccggaagtcgagtccgtttcccacccgtccatcccgggccgtccggatcacgacctgtacgagaagtacttcccgaacggagcaggctccatcttcaccttcgacatcaagggcggaaaggatgcggctcgcgtcttcatcgacaatctgcacctgttctctctgcttgccaatgtggccgacgcaaagtccctcgtcatccacccggcttccaccacgcactcccaggagaccctggaagagctcgaggaccagggcatccaccaaggcaccatccgcctgtccatcggcaccgagaacatcgaggacatcctcgatgacctgaagggcggcttcgaagcccttcgcgcttccggcttggccaagtgaggtcgacaggaaggttgacggcccgatgagaaggggcgcgatgctaatggggtgcatcacgaatcatcgagccgcatggggtgccttccgcctgatcgcttgacccaaggaatagaaagctcgcactgatgtcatgcagtgcgggctttcttgcgtctgtatgcctcacactgtttgcgcagaggcatgaatagtgtgagacctgagacgacataatcctcaaggatgagggccggcgcgtggccgaccgcccaattcagtctggcgcacgatggggcgcgccgttatttcttcataagttggaatcatcatccgggcataaggcccggccaaatatggagagacattatgaacgtgcagaacccggccgcatcgcgcggcatcgctattcaggccgtcgacttggtcaagaactacggcgctggcagcaatatggtccatgccctgcgcggcgtgaacgtgagtttcgaacgcggcaaattcaccgccatcatgggcccgtccggctccggcaaatccacgcttatgcacacgctcgccggcctcgactccgccacatccgggcatattcttttcggcggggcagacctgacccgcatggacgacaagcagctcaccttgctacgtcgccacaagatcggcttcatcttccaaagcttcaacctgttgcccatgttcaccgccgaacagaacatcctcatgccactgactctcgccggagacaagcccgaccacgcctggttcgacctgcttgtcgataccctgggactgaagcagcgcctgaaccaccgaccgaatgaactgtccggtggccagcagcagcgcgtggccatcgcccgcgcgctgattaccaagccgaagctggtgttcgccgacgagccgaccggcaacctcgactccgtctccagcgccgaagtgctcggctttctgaagcgttcggtcaacgagcttggccaaaccatcgtcatggtcacgcacgatgcggtggccgcctcctacgccgaccgtgccatcgtattcgccgacggacagatcgtggccgacgaggcgaatcccactgccgaaacgatgaacgatctgcttatggccgaacgcgaacgtgccacgcgcgctgccgtcaccagcacacgcgccgacacgctcgcccgtcttgccggcgtaaaggatgtgcccaacctgcccatcaccgacgctccattgcccccagctgggagaaccggcaccatgcatcatgcccgcgccgccgcacagcacgctcgctgagacggaaagcgagagacaggacacccccatgttttccatcactctgaaacttatgaagaaaagcgccaggatgctgattccggcaggcatcgccatcctgatcggcactgcgttcatcgccgctaccttcctgttcggcaacgcgatgaacgatgcgcttgccgcccagaacactgcccagctcggcggcgcgaactacgtgatcagcccggatggcggcaaggacctgaccgataaggaccaggactacatctacacgcgcacggttaacgacttccagcttgaccgcatccgcgccaccgaaggcgtcaaggacgcacgcgccagctacgcgggttccgtgaccgtaacccgtggcaacaagcatgccagcagctacgtcatcaccaccgccgcaaaacgtacgctgctgccggtcaccatcacgcaaggagaccagccggcggacagcaacgagattgccctgaccaagtccgtagccgaccagcttggcgtcaaggtaggggaccgtgtgaccgtcaactcgcaggcggcgcagtatgcgggcaagaccggcgattcggccggtaataccggtgacgctggtgatgagtcggcccagaacgccgatggcacgagctcgcacgacggtgattccgatgccgcgtcaggtgcgtccgcctcatccgacggtgtcgacatagccgtcgactccggcatgaccgtgcgcgtggtaggcctcaccgacgacccgaacggtgcctacgcctactacggtggcgcttccgtgctttccgacaacgttattaccgcgatggccggcagcaacgatttcggcaacctgcctgtctacctcgtctatctcgacatcgacgatgccagtgacacggctgcggcgtccaccgtaaaacaggtcagcacactgctccctaagcatttcagcgtgcaatcccgtgccgcgctcgtcgaggaatccgtcaaaagcatgagttcgggcgaaaccagcatcaccaccatcttcctgctgagcttcggcatacttgccatgctggtcgcggcactcgtcatcgccaacaccttccaagtgcttgtggcgcagcgccgccgcacactcgccctgctgcgcaccatcggcgcgaacaaaagccagctgtatgtctccgtgctgtttgaagccggtgtgctgggactgatcgcctccgcactgggagtgggcctgggcatcggactcatggccgcactatgccagtcgggcctgatgaaagccaccggcatgaccatgcgactggtgctatccggtccggtgttcacggtgcctatggcattcggcatcattatgacggtgattgcctcgctaggctctgcgcgttccgctaccgccgtcaccccgctggaagcgttgcgacccatcgaactgaccgacacgcgacgggccggtgtggtccgcgccgtgatttccatgctgctgattgtggccggcgtggcactgtgcgcattctctgtatggcagatgtccgagaacatcgccggacgtgattcaatggccgacaagcagtatccgctggtgctgctcgccgccatcatcggatgtgcattgatcttccttggactggtgctttccgccacgttctggctaccggtgctcatgcgcggcgtgggcgcgctggttgcactggccggtccgtccgccaaagtggcacatgcgaacattcagaagaacccgcgccgcgtggccgccaccggtgccgcactgcttatcggcgtgacgctggtctccaccatcgccaccggtgccgccagcgccaagcaaaccatgaacgaggcgctgaccacgcgctacagcgtcgacatgattgccgctggcaccgatatgactggcaaacaggccagcgaggcagccaaagtcaagggcgttcagagcagtgtctacgcgccgacccgcatgatgaccatgaaggatgccgacggcaagagcctgagtgtgctggtcgtgggcgtggatggcgtcgacgcgctgcgcaaggtggtgcgctccgatttgtccggcgtaaccattgatggcgattccgtactgatgcccaagtattccgccgctacaggcaaggatattccgctggacaagagcgtcacgttcacggctggagcggccgaagcacaagccgatgccgccaatggtccgtccggtaatgatgcgaacggcagcgccgaaaacggcaatggacaatccggcggcacacagacgctgacgctcaaaccgcggaaggtggactatcgccgcatcgcctccaactacgccgcggtcgccttcgtggacgccagccacttcaccaacggtggaatcaaggccgacgggcatatcatgcttatgcgcattgacgccgaaggcgcgggtgttgcgttgaacgacgtattcaccaacgtgcagaatgtgttctccgccagtgcgggtgttaccgtgaccggtccggtggccgaacgtacgcaatgggagaccatgatcaacggcatgatggcattgttggtcggtttgattgcggtggctgtactcatcgccttggtcggtgtggcgaacacgctgagtctgtcggtgatcgaacgcacacgcgaatccgccaccttgcgtgccatcggcatgacgcgtggccaactgcggcgctcgctggcggtggaagcgttgctgctttcgctcgtctccggcgtggtgggagtggtattgggtaccctgttcggctggctcggatcctacatggtgtttagtttgtacggcgacaccgtgttcccgttcgaatgggccaccaacggtgtggtgctcggcgtcgccgcgctcgccgctctgctggccagcgtggctcccgcccgccgagccgtcaagacgccacccgtcgaggctttggccgaggcgtagggcaataagctccctcatcagagggagctttgttacaccagcccgttatcgtacgcgaagactacggcttgtacgcggtcgcgggcgttgattttggccagaatatgtgccacatgggttttgacggtgggcagagaaatgaagagcttgtccgcgatctcctggttgctcagaccatgggcgatctccaccagcacctcgcgttcacggtcggtaagcagatccagttcgggatcggtgtatgccgggcgtgacgtattggaaccgtcggaagcggctccggcaggggaggggatgccggtcatcgagccagcaccgttgccggccgcaccgccagagacgccgccggcggaaccgtacacggcaccggagtgtgtggtttctccacccaacgaaccatgctgcgcgtaaccgtcctgcatcatcttttcgatgagtcgcttcgtggcggaaggcgcgataatcgcattgccttggaatacagtacgaatcgaattgagcaacgtttccggttcggtgtccttgagcaggaagcccgaggcgccggcattgatggccgccatcacatactcgtccaaatcgaacgtcgtcagaatgattacgcgcgtcggccggtcgtcagccgattcggccgagacggtcgcgtcggcggccagactggccgaatcggccgcgtcgcccggcgcggcggagagcgaggtaatacggctcgtggcctcaatgccgtccatgctgggcatgcgcacatccatcagcaccacgtcgggatgcagggattccgccaacgccacggcttgggcgccgtcgggcgcctgcccgaccacctccatatccggctgcgaaccaatgaccatggcaaaaccggcacgcaccagctcctggtcgtccgcaataatcacgcgaatgcttctgctctcgttcatgctctccactgtatccgtttcctatcggagcgccgctccatggacaccctgattgttccctgagttcatgttcgtggacgaatccgtctgagatgtggattccgcctgcctcatctggctggacagaggagcagccggtcgcagttgcatgtcgggttgtgcgccttcatgcatctcgtcgctgaatccggtttcacgcagcaccgtcagcaattgccgcatgtgcgccagagccgcacgcccgcgttccccgatgaccgtgaacgcggcgatgatctgctcgctatcgggagccggttcggagttcagcatggccagcccatcatcggcttgcgtgatcaccgattccaacgtattcaatacctcggcctgcatggccgtgccgatgcgattgcgctccagattggcggccagcaccttctgccgctcctgctcggccttgagcgcttcctcgcgttgcatgagcaccagcgcgttcgaaccgcgtgaacggctccaccgggccatcgcaatgcaggcaaagccaaacagcataaccacgccacccggcatcagaccggaaagcaccagcagccagcgggacatcgccgattcgccgttgaagggcagcagcatctgaatcagcatcccatagccgttccagccggacattatcttgatgccggccagccacgaatccgcaaccagtgccacgctgacccagcgccacgcatgttcgcggccatacagtacggcggcatgcacggacaccaatgcgaacatgttgacggtcaggatggatggcagaaacagcagctgcacggcggacagaatcgccatgaccagtgcgctgccctctgggaagcggcggcggaacgccaaaggcgaaagcataataatcgtcagcgttatagtcagcacgcggttcggcgaatacggggcattgccgatcatttgcaaatcgccatacgtggcggaatcaaatagcgcaatcagcacgatagtggcgataacgtccatcagaagatagtgccgctcggtccactgcgcaaatcgacccacccagttcgactcacgcgtatctccttggtcgagtactttggggcgcgcccgatccatcaatcctcgtatacgcgagataatggttagcaccggatcctccgtatcggtgccagactgtggggcggcaggggagagcggaatcgtagccgccacaataaagccaccattcggccctgggccggcttgcacgctgccacccaacgactcaatgcgttcgtgcataccaaccaatccgtatccgggcttatgaccgtctgctgcagacgccgcgccacggccgttatcggatacggtaatcgacagcacatcgtttgaccagaattcatcgatggtggctttagcaccctcgcccgcatgtttgcgcgtattggtcagcgcttcctgcacaagacggaacacggcggtttccgcgtcggcggacagccggtcaggttgcgctttgccggtcatatgccgggaaaccaccagatggccatcaaacagcgaatcgatgtcggcatatccggtactgccgctcgcaccgaacacattgaacagacgctgcatatcacgctgcgcgcgttccgcttcatggcgaatcgtgctcatcgtatgcttggcgacggccagatcatgcgcgcccgcataccggccgccatccgactgcacaataatcgtggagagtgtatgtgccaccacatcatgcatatcacgggcgatgcgtgcgcgttcggccagcgccgcgatgcgcgtctcctcggcctctttcgccacaatggaggcgttgcgctcgcgcatggccgccagcgtggccttgcgcgctcgctgccacaaggccatgatgatgacgctcagcacgctcgattcgatgagcgccgcctccatgccgacgtcagcgagcatcttggctccgcagttgacggcgccgcttgcccccacgacgccggtgaccgccgggcatgtgggcatcgtgatggcatcggccagccagccgtcgcggatggtgcgcgaaccggaggaaggtccggcgaacagcggacccacgttgaaagacaccgaccagaccgtcgccgcgaccagtcccatgacgaacgccgtgacaatgaaccgccaggaatgtcggggactgccgtacagaatcaccgaatacaccatgatcagggcgtagaaatcgaaatacgtgattgccgggccgagcacaagatgcgtgatggtcagcgccacgaacagccaggccgccggctccgggcgatacctgcgcagcatcagcggcacgaagaccggcagcgaccacagcgtcatcgatgcctgagttgcgggaaacaatatgccgcccgtcgaatcagggctggtgacgccgttgaacggcacgcaaccggcgatcagcgccgcggcgagcaacgtgtcccatagcagtgtgcgggtcgactcccgtgcgcaccatgccctcacgcgcgccatcatctccataacgcacaaggctagcgtgtccggcgacgaaccggtatcactcttcaggaggatttatggactagagtcttgaaccatgacaatgctgagcaaatactacgtgcccggactggccatagaggaccattccatcgatgttccgctcgactggaccggccacgagcccgggcgggcgttcgacggggaaaccatcaaactgttctatcgcgtggtcaccacgcccgaacatgtgcatgacgacctgccgctgctgatcttcctgcaaggcggtcccggcggtgccggcccgcgtttgaacagcccgacctccgatggctggattgaagaggccaccaagcatttccgcgtgattctgcccgaccagcgcggcaccggccgttcctcgcgcgtggacacgcacgtcatggcccgcatcgccgccgcgcacgacgatgatgccgcggccggcgcacgagcccaagccgactatctgaagaagttccttgccgattccatcgtgcgtgacttcgaacatctgcgcctgaccgaattcggtggccgcaagtgggtgacgatgggccaaagctacggcggcttcctgaccctgaccacactgtccctgttcccggccggcgtaatcgccagcttcaccaccggcggcatcccgcacgtgccggccgacgccgctgaagtgtacgagcataccttcccgcgcatggtgcgcaagacgactcagttctacgagcgctacccacaggacaaggagcgcgtggctgccatcgccgacaagctgccgactactgcggaagtcgccgaattcgttggcaaactcaccgattcagtactgaatccgatggctggtaccgatgtggagcatcgacttggcgtgatcgccggcatggccgcccacggcttcccgctgatgccgaacggcgacccgctcaccgtcgaacgcttccagtgcttgggatccgattttggcatgaagccgagcttcgagcgtgtccattggattcttgacgacgccttccttgatggcgatggttccgcttctgccgactcgccgttgtctgacgaatttttgaccaaggtgatgaacgccacttcgtcgcgcccgctgtactggccgctgcaggagttcatctacgccaacggtgagatggaacagccgattcgctgggccgcccagcgcgtgcgcgatggcaagcccgaattcggtgctgatgaacgcccgctcaacttcaccggcgaggccatgttcccgtggatgttcgaacaggagtctgcgttgcgcccgttcaggccggccatggacctgctcatggaagacacgcacttcggcgtgatctatgacgaagaccagctggcccgcaatgaggtgccgctgcaggccgccgtttacttcgacgacatgtatgtcgattccggtatgcagctcgacaccttgagccgcgtgggtaacagccactactggaccaccaacgaattcgagcatgacggtctgcacggctcgctcgtcttcaagcacctctacaccgaagccctcaaccgaggcgacctcgaagaactgttctgactcaaggaagcaagctccctctgatgagggagctctgtatacatgcacgaaaggaaaacgtatgactcagaacctcaccatcggttttatcggatatggcaacatggcccaggccatcgcccagggcttcgttgacgcgggcgtggtcaccggcggccagatggtcgcctgcgccgcccactacgacaagcttgagaagaccaccgccgaacttggcttgcgcccgttgcgcaatgcgctggaagtggtgacggccgctgacgtggtcatcatcgccatcaagccctaccagattgccgccgttgtcaagccgctggccgacgaacttgccaagccgggcaagatcgtcgtctccatcgccgccggctggaatctcaagaagtaccaggacctgttcgccaccgaagacggcgaatccgtcgactcttcggacattcatatccagtgcaccattccgaacactccgatggccgtgggcaagggcgtgctcgtcaccgaatccgtcaacaccctgaccgacgacgaaaccgaaaccttcgagcagctgttcgggccgatcagcctcatcgagcgcgtggacaccgcgcatatgaacatcgccatggtggtggccggctgcgcgcccgccttcactgacatgtacatcgaggccttgggcgacgccggcgtgcagtacggtctgcagcgagccaccgcctaccggctcgccgccaagatggtcgaaggtgtcggcgcgctctacatggccaccgaaacccatcccggggccatgaaggacgccgtgtgctcgcccggcggcaccaccatcaagggcgtcgcccagctcgaaaaggacggtttccgcggctcggtcatcgacgccgtcgatgccatcgtcggctgactgccaatcagagttcgcgtatattcgcatatcacagtcaaagccttcgagccgtatgctcggaggcctttgcatatggccggttcaccacatgcaggttcaaggtgtccagcttctccctagacttggaatcatgtctcttactatcggaatcgtcggactgcccaacgtcggcaagtccaccatgttcaacgcactgacccgcaacaacgtgctggccgaaaactacccgttcgccaccatcgagccgaacaccggtatcgtgccgcttccggatgatcgtctgcctgtgctggccaagctggtcaacacggagaagatcgtgcccgccacggtgaccttcgtggacatcgccggcatcgtcaagggcgcctccgaaggcgaaggcctgggcaacaagttcctggccaacatccgcgaggcggacgcgatctgcgaggtcgtgcgcgccttcgaggacgacgacatcgtccacgtcaacggcaaggtggatccggccgacgacatcgacaccatcaacaccgagctgatcctcgccgacctgcagaccatcgaaaacgcgctgcccaagctggagaaggatctgcgcggcaagaagatcgagccggcctacatggaagcagtcaagcaggcaaagaccatccttgaagccggcgagacgctcgataaggccgcacgcgaaggccgcttcgacaaggattccgtctacgacctgcatctgatgaccgccaagccgttcatctacgtgttcaacgtggacgacaacgagctggccaacaaggacctgcaggctaagctcgccgcatccgtggccccggctccggccgtgttcctcaacgctcagttcgaggcggacttgaccgagctcgacgaggcggatgcccgcgaaatgctcgaggacgcgggcttaagcgaatccggccttgaccagttggcccgcgtcggcttcgacatccttggactgcagaccttcctgactgcaggcgtcaaggaagtgcgcgcctggcagatccacaagggttggaccgccccgcaggccgccggcgtgatccataccgacttcgaaaagggcttcatcaaggccgacatcgtctcctacgacgatttcgtggccgccgacggctccatggccaagatcaaggaggaaggcaagctccgtcaggagggccgcgactacgtcatggccgacggagatattgtggagttcaagttcaacgtttccaaatagggtcttcagaccctggaaaacggcgtgattccaagggttccggggtgtcggaacgttggaatcacgccgtttttcgattcacggaaaaccgccgttttacgcacgtcttccgccgttttacgcggcgatagagtgtaaatagagtgtaattcgcaaagcgcggaggacactcgccgcaacgactcccgccatgtgcgtggacgctcattgagtgctctcggacacaaggagaacaccatgacggcgaagaccacacggaagacgggcggacgttcgcggcgcacgaagggcgcgggcggcatcatccaccgcgcggatggacgatgggagttccgccgcgaaatcggccgggaccccgcgacgggcaaacgacgctatgtctcggccaagggtcgcacgaaggccgatgcccgcgaacggttcgacgcgaaggtcgccgagatggaacgcaccggcctgctgcccggcgccaagagcccgtacctgaaggattacgcggagcggtggctggaggaataccggctcaacgtcaagcccaccacgtaccgcacccgcgccggcaggattcatgcgtgcatggaggtcatcggctgtatccgcctcaccgagctgacccctgaccatatccgccaatgcatgcgcgtgctttccaaacggctcgcgccctccacgctcaaggaccatttcgtgagcctgaagatgatgctcgaccaggcggaactcgaggagctcatccccgtggatccgtgccgcagggtcaagccgccaagggtggagcccaccgagaccaggatcctctcgccagaccagccgaagcagctgatcgaggccgtgcccaaccggggagcgaaacgacgcggaccggccctgaccgtggacgttgacgaatcctggatgctgctgttcgaactcgcgttcgcggccggcatgagggaaggcgaacgctacgcgctcatgccctacgagctcgaacaacgcgacggcgtgcccggcatcaacgtgcagcagcagatccagcaatacggcaaaccggaggacgccgtgatacccgcctggctcaaagccgagcacctgtacggtatcctgtggctcaccacacccaaaacccacgccgcccaccggttcgtacccatatccacgagcctgtggcaacgattgtgggcgcgcatcaaacgactcgacataggcccacgcgacctcatattcaccaactcacgaggcaaccccgtgcgcagcagcaccgaacgctacaactggaacaaggccttgaaagccgccggcctcccgccggtcaccatccacagcgcacgccactggaccgccagcatgaccgcccgcgccaacatgcccgacgacgccagaaccgccatcatgggccacaccagcatcagcatgaccaaccactacacccacagggacgcggccagtctcgccgcgctcctcgaccgagccatccctgacctgcacgacgagagggatgtgatagacgcgcaggtcatcgaggaggggaaatgacgaacgtgacgcatagtagacttgtccgcatgagcataaagaaagtagacgggccacaggaccatcatcgatttatcgatgaggccggtgacatgaccttccattccgggaagcggggccgcaaaacctcctccatcgggatggacggagtttcccgatgcttcatgatcgggctcgtacatgtgaaaagtcccctcgacgatgctcgtgcgactatcgacggtttttgtgaggagatcaacagcagcaaattcttccagagctttcccagcgtccaaaagagaacaaaggagggatggcacggcttctacccgcatgccagcaaagatcctgcggaactacgctatgaattcctcaaactcatggcgcaggagatcgacttctccgcacgagtagttgtgggccgtaagataccggcgatctatcagcagaggcacaacgaacaaccacgtgaattctacgccgacctcatgtcccatctactcaaatactcagggaagatagatccgttgattctcgacgtcgcggaacgaggcagcagcacatcgaacctcaaccttcagcatgccgtggacatcgcgcaacagcgcagccgtcgcggcacggtaacgcataatttgcgaaacaccaccaaattcaacgtccaaccgtatgatcacgaaattctcttggcgctcgccgactacagtctatggacggtccagcgagtgtacgagaagggagacgaaaagttcttcgggcttcttgaaccgaagattgtgctggtccatgatgtttatgattccagcagatatttcaaatcaaagaactattatcggccgaaatacaatcctctgaccagagcatccatcaacttcgacggatgggcgcaacctgaatggtagaaggaatagatggcccgtctcaactctagtcgtgctgtgacgacgacggcatgaagccgactttcgatgaaggacaggccaaaatccaataatacgaccagctgatccttcgaggggaaggatacctgtgtattcttgtcgctgatctataaatgatgatagacggtcatgtgggcggcagtcaagaaaatgcgacagattgtctaatcgtcgatatgtcgcagggccgccccggcgctcgcaaagagcgaccggggcggtttcgtgtttagggcttgatccgcccgacacgggatttattgcttggccgtcttgacggtgatggtggtaccgagcgcggtggtctcccagctcacgccgtccgcctcactgtaggtgaagtccttggtggcatcctgcgaggcgaggagcgcgctggccatggtctcggtgtcgccctggctggtccatttccaatcgccggctgcggccggtgcctgataggtgcccttccagtagaggctcttggtgtcggtgccgatccagtcgacctcgatggtgtcgccgctgatggtagcttccatgtatgagctcgggtcgttggaattggtctgcttccatgtgccggtcagatcggccggctggggtttgggctcttccttattggtctcggtctttgacgtgccatcggatttggccggcgcatcggccgtagtgcttcccccgcaagcggacaggccggtaagcaacatcgccgcaacaagcagcgcgattgcctttttcatgattggtctcccttcgtgccggacattgtcgtccgacatgactcaatcatatggcgaaacacaagaaccaaggactcatcccggtgctcgcggtgagtcgtcgggatgagtccttatatggctcggaagctacgcggcgagttccacgggagcccgctcttccaatttggagtaggggataacggcacaccgtagttgcggaacgcggtgagcgcgccgcgctgcaacggcgtctgccggtcgtcgccgatgactatcagccgggaatccctgcgcttgggatccttcttcgtgtcatcccaaccgaacatgatgtctttcacggcgtccttgtcgaatcggttcggtgcctggcagaaccgggtcggatggttagcgctacgctggaacaggaaatcgaagttgtgctcgtagctggatacgcctcggatccccacgttcggagtgtagaacacatggcatgagtcgagtttcaatgcaacgtcgtcagcaaagtaggacagcaccctcttctgttctgtaacggcatcagtacaatgttcgtaatgaacagttgttcgcgcaaggaaatgccggcatatggtgcgtcatgttcaaagcatagagattcattatccggcctccacgagaatgatttggttctagcgcaatacatgctttcacgacacatgctttcgtgatacatacgttggtcagaagatattgcgctagaactcagcagtcaccgcacgtggtccacgatgtcgttgaccttggtcatatcgatatcgcgctcgccgaatgcctgccgctcgtaggccaggtcgatgtggtgttcgtgtgcgtaatcgatgatacggcgagccaaatcggcaatgtcgccggacttgttgaaggaacgaccacgcagcagcacgcgttgcataagagggcgcatcgccttgaccaacttgtaccggtctgacttcaccttcaccatccaaccgtcggcaaaatatagcaccacgccttcatgcgggcttgccttggcgtcgccgattgcctgggcgacttcttccggcgaatggcagatcgccaccgtttccggccgcacgaagccgccggcaagagtgaacgtttcctcgtgagcggcatcgatggagaacgattcggcattacgaatcaaatgcagcaagcgcagcccggatgattcgtatccaacgatgtgccggtcggactcgcgatcgatgacttcaaacgccgccgtgacattccactcatgcaacatacgccacaattcggcacgtaccgctgaatctgaaggaaacaggcgctcgataagcgcggaataatccgtttgccccgacttcgaccagaagcggaacaatccaggagttcccgccgcgcccacgagcccgagaaatccgttctccttgcgctcaacgcgcacgggcaacgactctggatgttcttgagcgtgattgacgacttgggcgaacgatgtctcctccgtctcgtccacagcaaagaacttctcgaacccgcgttgcaccacctgaccgttgccgccgacaaaaagccctcgcgcattgatggtgcgatccgtccaccgatgttcacgaaatgcctctgcagtgaaattgcacgcatacacgtctgtttcgccgcgcaccggaataacccgaacgtaagggtccgcgcgcatacgctccaacaggtttccattcggatcgcccggttccaacgggcggaacatcgcggtgtgaaaatgcttccaggacgaacgaatgtaatcttccggaacacggtcagcggtatcacgcgccgcattgcgacgcaacaattcgtctagaggaacgtcaaaatccctcgtttcccacagtgcgccatgacgttgagcgagtagcgccagttcggctgcataccggggattagcgtgttgcgcatccgccaccacatcccaccccgcatccaatgcgtcggcaatcatgtgccgtcccatggcaaccaccatgtcattgaatcgcttgccgtgctcggattgcagtcggtttcggacctgtgccgagccggcgatcatgagccgaatgtcatcgagagaaatcacgcaatgcggccacgtgttggcggggtcctcacaccatgagcgtgcccacgtggacttgcccgaagcgggcagtcctcgcagaataatgagctttgccatagccaagctcctttcgttgtgctgtggggcgagacaggtgccagcgatggcataaggttctgctcgccccaatattgcttgtattatgattcggctgccgaaaccgagccgcctggttcctgctgtgcggcggagtcaatgggcgccggcccgggggagtcgggcatatccagcggtgatacgtgcgttgaatcggtcgcgtgtgcatggaaccagtcggcaatctgtgtttcgcttaccggttgcagattccatgcgtccagtccaacgttgagggcttcgtggcgtgcgccctccggagacagctggtgcgtgtgaccatacagcagacgatgtccgtcgaacggcaatgcctgatcgcggaaacgtacggcatcatccggccagccataggcaagatcctcacggtaggggaaatgcgatagattgacggtctccgttgcctgcgggcggccaattccgagaccggtcagctccgccgtgctgttcggctcaatcgattcgaacagatctcgcgcgggtgcatcgtccagccaccagtcatcgtgattgccgataaccgcgtgcagatgcctgcagcgcagctgacgcaggcagctcttcagatgccggaccgatgttcggtatccgatatcgcccaaaatccacagctcgtcgtcctcgccgacaatccgattgatattggccacgattgcttcatcgtgcgcatcggtgtctgcggccttgcggaaattgagccgggaatcgtcaagcaccacgcccttcgcccaatcctcggcggccttgcgtccctgcgaggagaggagagcgtcatactgcgtgtgcccagggtcgaacgtggtgaatccgcgcagcacgctgaccagcggatgcccgaaatgcgtgtcagtagtgaaatacttcatgatctgttgttctttctgaatatgtgatggtatgcaatgggttttgctgcggtgcattgagttgcgacgatgccaagaacacatgctcgtacaggtgcgtatatgaggcatggcgcgaacgagtcggctcgatatcaccggcaatgattcagctatgcgccaatgagaggtgtactgatcagatttgtatggcagcgagcaggctgcgcttgtttccggttattggttggaactgagcagtacgcaaaccctgtttgaaggcgcattcgagcatcgccggcaggttcatctgctggcgcttggcgtgttcgttcacaccgttgctgctgaatgcgatacgttgaatcatggtgtgcacaccataaggccttacgtccgaatccgtcaaatcacggtgtgtgaaatgcctgttgtatataaaaaagtccggtgcaacgcacgatgataatgcgctgcaccggacctactgcagaaacaattgttacagactgtagatctgtgcgccgaacggccagagcgcgagcttggccattttgaacgactggatgccgaacggaataccgataatggtgatgcagttgagtacgccggctcccagatagccgagcgccatccaccagccgaccagcaccacccacaggatgttggccaaggcagagccgactccgccgccgtattgcacggttttgccaaacggcgtcagggtgagtcccgccatcttgaacgcttgaatgccgagtggaatgccgatgatggagatgcacagaatcagtcccaccaatgcccatccgattgcgatggccaatccaccaagaatgatccacaggatattgccgagaactcgcatgattagtccctttccgattccggtcgattccgcgcatgttcagcttcactattttgccagaaatcatgacggaaacacgagatgcaacccttagctcgcccctgattcatccccggaccgttattcaggcggaacgtatgcggtaagcccaatccttttgtgaagattttgtgtattgtcaggcatgcgtgggtttcaccgtcgatttgaatgatgataggcttctcgatgtctgccgtacgaagaccccatcaaggagatgccatgaacctgtatcgctacgcgatgttcatcgcacgcgcctgccgtgggtcgttcgtcggcaatgttctgtttgccaatccacgaatggccctattctcgatgctggtgtagcggggacacgccttatgccgggatgtaccgatggcccatccgcagtcgacgtcgcatgaatcgctcaccatagccatcaacttacgcaaagccgcgaatcgtttgccgtatatgaatgcggaacggatggcggcttttcctttacgtccggactcatcggtgtcctcgcgtcttgacacaagcatggggccggatcgccacacatgacgttaccaacagaaggaaatgctgtgacctcacagaaaaacgcggaactcgggtccgccaccagttccgtaaagcctattgatccgcacacccgattcatcgttgtgggtgtgatcgtcgtcggctcgttcatcgcgctgctcaaccagaccgtcatgtcaccggccttgccggcactgatgcgtgatttcaatatcaccaccggcaccgtgcagtgggtgaccagcgtctacatgctggtctcgggcatcatggtgccgatttcaggctatctgattgataaattctccacccgaaagctcttcgccggagctcttgccactttcatggtcggcacactgctgtgtgccgtcgcgccgaatttcatgctgttgctcgtcgggcgcatactgcaatccgccggctccggcgtgctgttgccattggtcgccgtagtaccgatgctcgtctatccgccggataagcgcggcaccgccatgggcatggccggtatcgtcatggccgccggcccggctatcggcccggttgtcggtggtctggtgattgacagtttcggatggcgcccgatgttcattggcatcgcagtcgtggcactggtcatccttgtcggaggcacgatgatgctcaagaacgtcagcgagttgaagaacccaaagctcaacatcctgtccgtgatcctttcgaccatcgcgttcggtggcctgctttatggcttctcgtccgcttccacgatgggatggagcagtccggtcgtcattatctcaatcgtcgttggtcttgtggccttcgtcgcattcgtatacaagcaagtcaagctcgatgagccattgttgcgcgttgatacccttgccacccgcaacttccgcaactccgtgattctggtcactctgatcaacgccgcagtcgccgcaaccaacgtgacgttgcctatcttcatccagaatgtgctcggccaatccgccaccgtcaccggcatggttatgctgcccgctgcggcggtcggcatcatcctgagtccggtcgccggcgccgcattcgacaaattcggccctcgcggcgtgggcatcggcggccttgcgctcatgaccatctctcttggtcttctcggcaccatcaacaccgggacatcagtgctgtttgtcgccgtgttctgcgcattgcaggcatccggtcaggctatcgccaacatgccgatcaacacttggggcgtcaacgctttgccgaacgacatgatcgcccatggaaacgccatcgccaacaccggccgccagatcgcggcagccattgcgacctcgcttctggtcaccgcagaaacatccatgaccgcctcgcacatgtcccagggtgtgaagtccgccacggccagcggcatcgcgttctcctacctgctgtgcgccgccatctcgctggtcgccctgatcatctgcatcttcaccgtcaccagccgtgccaaggagcaggccgcacgcaacgccaaggcctccgaggcgcaagcctccgccgaagtcgcggccgaaaccactgaaggccagcccgccgagcatcactacgccggcgcatacgtggcccccgccgcctccctgttcaagcaggcccaggaacagtccatcggcggaatcatggacgatcagccctacagctgcctggacagcgatgacatcacgcatgtggtgcgcgagttcatccgcctcaacgtctccagccttcccgtggtgaacggcgatggcaggctcgtcggcttcgtcagcgacggcgatgtcatgaaatcgattgccacctatgaatcccgtacggtttccaccggcaccggttcgacgatggtggtgttcgacgacgaaaccgtggcctccaaggtgcaggcgctctccggcaagaaggtgatggacatcgccacgcgcaaggtcgttgccgccacgcccgaccagcatgtcggagaggtggcccgaatcctcgccaagaagcagttcaagaaactgccggtggtggatgctgatggcagactcgtcggtgtgatccgccgtaagtccgtgatggaacatgccttcgatgcgctgttcccaaaggatgatcggtgattaggcgccatcatcgctgaatagaatgaatggaatatgaggcttcccttctcgcgggggaagcctcatcgctttgtccgcggagtcttacggcacctgcgcaagggcaacgtcacaccttcatgattatactatcgaatagtgtgttcctatcgttgcatggtgacgctaacgcatggcgtcacgatactgaagcctgccatctaacggcgggtacggctcgttgctggagtcgtgcacgcatacgcgcgtcggcgtgcgtatgccgtgatgtgacctttgtagtggaattgaagaattgagaacactcgtatgtcttctagtcaaaaaacaactgaaccaactgtgcgcgaaacacccgaggtttccgacgatgacaatgtgaatgcgcgcgcagcggtccatagcgcgaacaaacccggtgccgcctatgccgcagcagtggccaatggggaatccgagcgtgcgtggatccgccgtgtagtgcttctactcatcggccaggcgttctcgctgctgggctccaatattgtgcaatatgccatctggtggtggatcgtgctgcagacgaacagcggcatgggtatgctgctggccacgttgtttggcgtggtgccgcaggcgatcgtctcgattttcggcggctcctgggccgaccgtcacagtcgcaagttgctgattatgctgccggatatggtgattgctgtggtcaccgtcgtgctgtcgctgagcttcgcgatgggatgggtgagtctgaccatgattttcgtggtgctgttcattcgttcggcgggcggcggtgtgcagacgcccgctgtgcagtcgttcataccggatgttgttccctcgggcaaactattgcgcgtcaactcaatatacggcgtgattaattcggcgaatatgattgtggcacctgcggtggctgctgtgcttatcaacacagtgccgctgtggtcgattctgttagtcgatgtgaccacggccattatcggcgtcggctttgtggcgttgatcaaagcgccgaagaagagcgcggaacatgttgcgaggcgtatggctgaagcggagaatagcgggcaacccgcactcgaaccgatgtcggatgccaatgctgatcgttcgctgattgccggcgtccgtcgtgtgtttgctgacttgaaagatggcttcagctacacatggcgccgggcgaacctgcgcaacgtggtgctcggtgacaccttggtgtgcttcgtggccgtggcgccgatgaaccttacgctgttgctcatgacccgcgaatatgagggcatcgatttgaatctcggattcatcaacctgaccaccgcctccgataaactcgccgccaacgagctgggatggagcatcggtatgctgctcggcggcgcgctgatgtctaccatcggtgccaagctcatccgcaacaacatgcgcgtggtcgccttcggcatcactctggtgggcgtctccgtcgttggtcttggcgtggttcacaatctgctggcgtatttgctgattgatgtggtgaacggtttggcttcggccatctgcatgggcccgatgcgcaccatcatccagaccgaggccgatgagaagatggtgggccgtgtattcggccttgacaccaccatgagcacactcagcatgccgctgggtatgttgatcttcgcgccgttggccgacgtgatcccgatttcgctggtgttcatcatcggcggtgtgctgactctgcccatcggcatctatctgttcggccaggcgcgccacaacaccagtgcacaggtgactcggacacaagcctgacagtcgcctgacagccaccttgcaggcgcaaagtcaactaccagatttgcgcatacagatcgtaagacgaatacttcggcagatcgtagacggtaatcgagaatggcgtggatcggccattgcccggccaatccacgaatgcgatatctccatagatgattgcgttctgtgcgttacgcagtactagggaaatcttgatttgctgcccatcagatggcttgaatccatctgccacggcgcggacctcgccattgaacgtcgtgccgccgtccctgttgtctattttggatgttccgctgatggggaaggcggcggttccctgagccttggcgacgttgtatgtatccggattgagcacagtaaaatcaaccgtttctggggcggtgccttcgcctgcttgaccggcgtcatatacagtctgattcgggaatgccatattcagtgcttgcgtctgcgagaacacgatggaaccgtctttggcccgccccgtaatggtaatctgcggatactgcacctgctgggtcttactggtgttgcgcagggcgaaagcgtagtggacatacccttgctggtccgccgaccagccggattccactattttcagaggattgtcggtgacggtgtcttgattgtctccatcagcgccgtcagtgccgcctactccgcccgtgccattggcattgtcggttcctgacccgttcgaggagtgcccgccatcggccttatcggttgattggctgctggattgtgtcgaggaatcgggtgatgttgccgacccgataatgccaagttggcctgccaacacaatgcctcccgcaatggcggcgattatcagtgccgctccggcaatggaccacagcacgatggcgcgtttgctcaagtgcagacgccggaatagtcgagacgccgacgcgctgccgttcgttgttctcgttgatggcggatttgccgatgatgcgttcggtatgggcggattggactgggagaacagcacctggcgaaactcctggacgctctgtggccgtttgctgggctcgaatgcgcacgcatagccgatgacggcgcgtagtcgagccggtactgcggcatcatcggcaagtcgctgctcgtagtcgctggcatcgggatatacgccggtcagcatgaatccgagtagccggcccagcgagaatacgtcggaacgcgcgtcggttttggcaaagccatattgctcaggcgaggcgaatccgtaggtgccaagcgccgtggtatcccgtgaacggttgcttgcctctgaccggatgcgcgcgatgccgaaatcgatgagatgcgcgccatcctgggccacgatgacgttggccggcgtgatgtcgcggtggataacgccgtgctggtgaagctcctgcacggcttcgcaaatttggtcgataagctgcacggccacattcggtgcaagccgcccgttttcctccgcaatttgcgcaagcgtgctgcccggcacgtaatcgtagacgatgacgaaccggtcgggcagctcgtacgtcgcttccacacgcggcagacgattactctggcaggcgctgagcgccgcccacacattgcgttgcgccaggggagagggaatcttcttgcgtacgaacgggccgttgccgtcaatgctcaccagttcggtgacgccggaaggtccgcgagcgagcgtacgctcgacatggtacgcatcgtcgatgctcatcgcatgcatcgcctgcttatcgtccatgtctctccttgacgccctcttacttgcgtctcactggtgagtgttgttgggccgaatgtcgtcaatcggccggtagcaacgtcgcctctcccatacgatacaactcgtcgtccgtggcaatgcggtcgaatccattgcgtatacaccagatgataatcgcgtcgcgtcgctgtttgcaccacagttcggaaacgcctgcaagacgaagcagccgttgggtttcacgtaatgtgcacttgagaccaaaagccagcataatggcgtgatctcggccggggcggcttttgccggagaaaatgtcataaaccactgtggcgttgaggccggatgcccgcaccacgtcggctcgtctcaggtcatgggcttccatacggtcgaacagatagtcggtcagcgtgcgtgcgctgacgagtccctcatcgagatactgctcaatgctggcgctggcgagcagccgatccaacagttcctcggtcaaatgttcttcggggatgtctgccattgcccatgctccttgtcgctgtgttgcgggtgctgtgctgcgccatcgtacgcggttgctcgattcccagcgtacaggacgccgacttttcggaaacacgccgaaaaattcagttgtcagctgatgtatggcccgcgcgtgtcgccgacaatggtcgatgccatccgtgtaggtgcggtggcggaaaggatgttcatgcgcggtatcaagcatcgacaataaagctaacatgcatacaaaatgctaatttgcgtacataataacaacgccatacactggtttcgatgtatcgcagagcaaagcgagcaataagaagggacgcaatgatgagcgaacgataccggcttgccatggcagtcggattgaccgtaacggttgccgggcttgcctcttctgtgctggtaatgctgctgcttaaggaaagaagggcatcatgacaacgccatttgatcaacaacctcagccggttccaccgtccgaaggcacgaatgacgcaccggaagatcgcgcgaatgcgcctaccgtgccgaatactgtaccggctggccaaccgaacgtagcgtctgatggtgctaccaccactccgatggctccggctacggcatcgcagcggcccgccggcgcgccatttgatcgtgtatatgcggtcagtccgcaacagctgttccaagttattcacgaccagctgactactggcgccacgtttaccttggataacgaaaacacccagaccggagcgttttccttccactcctatgatggggtgaactgcacgctaaccgtagtcccgcagggtgcggcaggggccgccattcgtctggaggcgactggaaacgaaagcgccaagcgcgttgatgagttcctcgccgctctggacaagcgtattggtgtggctcctgcacccgccacacatggtgccggtgctgccactggttttgctggtgccgctgcgcctgccgtgcttgctccgaatgcacaaggggtgaagaagacttccaagctggctgtgttcgccattatttggggagtgttgttcgtactcgcccaatttgtggatgtttctggccgatcctggggcggactgctgttcgccacggtgattccggcactgctctcaggcttcgccgtatacgtgacccgcccgagtggcaaggtgcaaggccgagtgctggcctgggtggcagtcggtatcaccgttgtgggtctggtaatcggtggcgtgttcgtaattcgtgacgatgcgaaggccaaggctgatcgggcggaattggaagcatcgctcgccaccaagtgcgaagcatattcatggccggagtcggatatcgcggcgctgctgccgcagccgaaatccacaaagggtgaaattagaagcgagtcttcggactatttctccatcgaggtgtgcgataccgacgccaagcagtatgccgactacgtcaagtccgtgcaagacaacggtttcaccgtggactatagcaagtccgctgacatcttcaatgccaagaacgccgatggatacagtgtgagcgtttctcgtgacactgacgacgagaccatcatgtccatcactatccaggttccggaaaagaaggaagatacgtctacggacggcgacgccgcgaagcaggatgataagagcactgatacgggcactgattccagcgatgccaacaagcagagcgaccagtcttcggatcagaaggcgcagcagaacaccaatgacagtgctgacttcaagtccacgatggacagctacgaggcctttatcgatgagtatgttgccttcatgaacaaatatcagaaatccgacaacgtggtcagcatggctaccgactatgccagcatgatgaagcgttactctgagttctcccagaaggtagacgccattgacgaaaactccctcagcagtgaggattcggcctactacaccgaggtcatgactcgatgcgcgcagaagctcgcatcggtgggccagtgatcagactggcgtatcgaggtaacggttttccaagaaaggaacgatgacgatacatgggtatacgcggcagacagtatacgccaatggatgagccggtcttcaacaaggccatccccggaacggaggctctggccggggcgctgaaggacacttttggcgcattccgtagtgggcttgggattaccgaacccgtggtttcggtgaattgtgaaggttgtggcgctccgctttccggtcatcgcaaagaagtcgttcgatgcgaatactgcgatcgcgaaacgcagctatagccaacatgccagcataacggccggtcttgcgattgcatagtcgcaagaccggccatgtgcattgagatatcgaggaaaacagatggcagttattaaggcgttcgccggcgcgctcggcggtacattcgcggacctgtggcgtgatatcatcaccgctggtccgttcacggaacacaccgtcgttgtgccgggcattccccgcggaagcaacaacgatcgcggttcgaatgaatacggttccgagggaataatcaccaatggttcgcgtatctatgtgccagagaatactgcggcgttcattttctctgaaacaggtatcgaaaacgtcatcaccgagtcgggcggttatgaatatcgcaacggggaacagagcgtgctcgccggagacggcatcggatcgttcttcaaccaggtcgccgatcgattcaccttcggaggtcagcctggccgcaccaaatatgtggccttcgtcaacctgcgtgagattcgtggcatcaaattcggcacttctgcgccgctggtgtataacgaccggttctatggcgtcgatttggaaattcgcgcacgcggatccatgtcgctaaaggtcactgatccagttcgattcgttcgtaactttgtgcctgccactaccgtgtcgtattcattcgatgatgaagggccacgtaggcagattctgtctgaattcgtacagtcgtttattgtggccatcaatttgctgtccaatgaatatcgtatttcgcaattgcccggcaaggcgaatgacatcgcagcatgcgtgcgtggcgatcgggccaatgcaggtacgtggaatgatcgttttggctttgaagtgtccagtgtgggcatcgaaagtatcgagttcaccgagcaatcacgtcaactcgtgcagcagttcgcctcgaataagatgaatgttgccgcatacgagggcgtttcccagcaagctggcaatatggctgcccagcagcgcattgcgcaaggcatccaagacaacggctttggcgatggtggcatgttgctgggcatgaatatggcacaagccattaatcctatgacggccgccccggttcaagcgccggcgcctgcgccggcgccggaagccgctgctcccgcctctcacacggcatccatgtctgtggaagaacaagtcgaggcgatgaagaaattgaaggaattggttgatatcggcattctctcccaagaagaatttgatgcaaaaaagcacgaaattctcggcctataaacggcgcattcatgcaactcgaaatagttgataatgaaggaaacgctggtgcgacacggacaaaatggtgctcagggcttcgaactgggttgttcaatccgtttcgatatttcggcgactcagcgcttgttcgggccgccgtccgggaacatcaagtaagtgatgatgccggcggcggttccactggccaatgcgccggtgatgacggcaagagcctgcatcgccgtgctgagcgtgggcttgcccgttgcggcagtctttgaagccttcaatgtggcggcactgggcttgcgtttctcggtggcggcgttgtcggcaacgttgccaccgtccgtattgactggggcattgtcggcaacggcctcgccgtcctgctcttgagcgcgccgttcgcgaatgcgttgctcaatgggatcgtcgaccaaagtcttgatgatgcgtgccagatcgcggtcttcacgacgtgcgatttcggcgctgaacaccgtacgtaaagcgagatactgcagtttggtcatcgggcttttgccggtctccaagttagacaccgtctgtcgcgcgactcccagctcgtcggccagttgctgagtcgtccatccggctaccttgcgaatcggacccaggttctcctgaaacttatcaatccaccattgttcgatttcagacgtcgccattacgcacctccttccacgctgtcaccagtgtacgttacctgtaccgaaatcaatccaaaaaacagtgttcatgtgaaattcactgcgtatttgcgctttcgccggcttaccgagattagccttagacaaggaataacagagtagaagcagaaggtatgcgcgtattcgatttcgacggaaccatctatgatggcgaaagcctgttcgacttgtacctgtattccgcccgccacgacccgaaagtgttccgctatatcgcccccgtgctgcggtacgcggtcaaatacaagcttggccgggccacgcttgaacagatggaatacggcgtgggcaagatgaccgaaggctatctcacggaactgagccgatccaaacgggtggcgagcgtcgaacagctcgtggacgatttctgggaccgatattacgcacgtatcaagccttggtaccagcctgagtcggacgatgtgatcctcaccgcatccttcgatctgacggtgggggaggcctgccgcagactcggcgtgaggaatctcgtggccagcgaggtggatgtggggacgatgaaggtcacgtacctcaacttcagcaccaacaaggccaaacggttccgcgaactgtacggcccggacgccgtcatcgacgagttctacaccgactccaaattcgatcagccgatgatcgacatggcccggcacgcgttcatggtcaaggggaacaccatcacgcaagtcaagtaggaaacaacagaaaacaacacaacgtaaccaataacgaaaggggaacatatatgagcatgccgctcgatctatacgtaatccggcatggcgaatccgaagcgaacgtcatcgtccaggcgggcgagcagggcgacaactccctgtacacgcaggacaacgtcaccgtacccgaccgctcctggagactcaccgccaccggacgcaagcaggccgactgcatcggtcgctggctggtcagccagcagcagctgttcgaccgctacatggtctcgccatacgtgcgcacccgcgaaaccgcagccaccatggccctgcccaaggccaaatgggaggagaaccgtgtgctgcgtgaacgttcttggggcgagatcaacaccatcaccaaggacgaattcaaaaacaactacgcgcgcaactggaacttcaagaacaccgatccgctgtactggcgtccgccggcaggcgagtcgattgccgatgtggccgaggaccgtgtgcacaacatcctgacctcgctgagccgcaaatccgattcggaatccgtggtcatggtcacccacggcgacttcatgctcgccctgatgctcaccatcgaggatctggccgacgaggaattcctgcatcgcgccgattcggacgactggaagatcaccaactgcacctgcctgcactacacacgtcgcgacccggaaaccggccgcacttccaagcgtgtgcgctgggagcagaccgcccggcccgtgctcgacgagacgaccggccgctgggaggtcaaggtggagccgtggcgcgaattcaagcgcccgtatctctccaatggcgatttggtggatgtggtgcaggccgtcgatccacacctgctggagtattacggcaaatagcctttcccggaagagagacttcacaaaatcttcgtgagctagaatggtgcgtggtgcggctggttgtgaatgccgtgccccaagcgagagcgaggagagtagtaatgtccaatatcttccaatggcaattgcatggcgacggcaagacgctggcgcccggcgaggtagtcgagcccgatgaacgtctgacttgggtgcgcaccgccggtatcggcgcacagcacgtcatcgccatgttcggtgccaccttcctggtgccgattctgacgggcttcgacccgtccaccaccctgttcttcacggctatgtccaccgcactgtttctgctgatcaacaggaacgtgctgccgagctatttgggctcgtccttcggcttcattgcaccgatcaccgcggtcaccaccgccaacaagggcattgcggtcgccagcttcggcatcatggtcaccggtattctgctggccctggttggcgtgctcgtgcattacgccggctccaaatggatcgacatcatcatgccgcccgtggtcaacggcgcgatcgtggccatcatcggcttcaatctggcaccttccgtgtggaccaacttccaagccgcgcccgacaccgcactggttaccctgttggccgtgctgctcgtggctgtgctgttcaagggcttgctgggtcgcctcaatattttggtcggcgtgatcatcggctatgtatatgcctgcatccgtggtcaggtcgacttctccgccatcggcgacgccgcatggatcggcttcccgaagttccacctgccgcaggccgatttctccatccttcccatgttcatccctgttgtgcttgtgcttgtggctgagaacgttggccatgtcaagtccgtggcccaaatgaccggccgcgactacgacaatcagatcggcaccgccctcatggccgacggcctgggcaccacgctcgccggcttcggcggcggctccggcaccaccacctacggcgagaacatcggtgtgatggccgccaccaaggtgtactccaccgccgcctactggtgcgccgccgcctttgccctgatcctgagcctgtgcccgaagttcggtgccgtgatcaacacgatccccgccggcgtgctcggtggcgtgaccacgctgctgtatggcatgatcggcatgatcggtatccgcatctgggtggagaacaaggtcaacttcgacaagccgctgaatatcatggtggcagccatcaccatgatcattgccatcggccaattcgcgttcactgttggtggcatttccttcaacggcattgccattggcacgatcgtgattcttgtggcctaccacggcctgaaggccgttggcaaggcaaccggcactattgccaaagacgatccggatattttgtagtgtgttttagggctactgggctgtatcttggctcagcccttttgcacaatggcccctaccttcacgggtgggggccatttgcgtgttccatggagcggtgctcgccttacgtggtggtaaaacccatggggcggcaaacaccccatggggtggtaaaaccctcatggggcggtaggtgaaaatggctttattctgcggtttcacaatttcttcaaaccgccccatgggcaagttgccgccccatgggcgagttaccgccccatggggtcataagtaaagagtgggatgacagtgtggcgagcaccaagcaaagtagggggcttacgctaagctcggaaagcttgcgtaatttgcgtaacctttgacatgaaaggccactgtgccccgtaataatttcgatgatcgtgacgattccgctgatttccagatgaacgacagcgcggaatcccgcccccttacctttggcgaacttggcgtacccggaccgctggtgcgcgtgcttgcggcagatgacaagaagaccgcattccccattcaggccgacaccctgcccgattcactggccggccgcgacattctcggccgaggtcgcaccggctccggcaaaaccctcgcattctccattccgctggtcacccgcctcggttcctacgattcgttcggcgaaatcgcgatggaggagttccgcaaggaaatcaagcgccgcaagaaggccagcctggaagagcgccgcgccgacgacttcctaccgcacccgcgcggcctggtgctggcccccacccgcgagctcgcgaaccagatcaacgacgtgctgatgccgctggcccacacgttcggcatgaacaccaccacggtgtacggcggcgtcaagtacatccaccagatccgcgatctgaaggccggcgccgatatcgtggtcgcctgcccgggccgccttgaggacctgctgcgccagcaggcgctcacgctctcgtccgtcgaagtcgtggtcatcgatgaggccgacgaaatggccgatatgggcttcctgccaccggtcaagcgactgcttgagcagatttcgcccgacgcccagcacatgctgttctccgccacgctcgatcacggcgtggatgaagtggtgaacaccttcctgcacgatcccaaggtgcacgaggtcgattcggccaccgccgaacccgacctgatgacccaccacgtgttcgaaaccacgcgcggcgacaagcacgaactcgtgcgcatgctcgcctcgggcgaaggccgccgcatcctgttcacccgcaccaagttccaggccaagaagctcgccaagaacctgacgcagaacggcattccggccgccgagctgcacggcaacctgaaccagaaccagcgcgatcgcaacctcgctgcgttcgattccggcgatgtgcgtgtcatggtggccaccgacgtggccgcccgtggcatagacgtcggcggcgtggagctcgtggtgcaggtcgagccgccggccgacccgaagtcctttgtgcaccgctccggtcgtaccgcccgcgccggcaaggcgggcgacgtggtcaccctcgtgctgcccgagcagcgccgcgagacgcgccgcttgctgaaccaggccggcatcaagaccaagatgatcgaagtgacccacgattcgcccgaagtgcttgagcttgtgggcgaccgcgccgagcgcgtggatggttggagcctcgacaagtcgcagcccgtgggcaacccgcgcaagggcaagaacaggggcgccaagaacgcggcgggcgacgagtccggccgcggcggcaagcgcaagcacaatcgcaatcgcaaccgtgacgagcagaacgttgccgagaccgagttccagcacgagaacgcaggcggcgagtttgttgccgaaggcgagccgcagcgcaagcacggcgacaaggccagcaagaaggccgtgaagaagaaccgcaaccgtgcggaacgccgcgccggcatgagcaaccccgaggccgagcgccgcgactatctgttcgagcatggcgatgaccgccgcgaggagcgccgcaagggcgaccgtcgcgacggatacggcaagaaccggtacgacgagcgtcaggacaatggccgcgaccagcacggcaagaaccgtcgcaatgatcggtacggcaagggcgacaagttcgataagcgcgacagggccggatacggtcgcaacgatgatttcggcagccgcaggcacaatgcgggccgtgatttcgaacggtccgattcccgcgatttcgagcgtccgcgcaagcctcgccgcaatgaacgcagccacgaggattacggcttctcctatgacgagcgctcccatgacggccgcagacagtccatgcgcaacacccgtcagggcgaaggcggcaagcgcatccatcgcaagaacgagaaccgcatcgtacgcgacgagcgttcagaaggtgccaagcgtcacgaacgccgcatgatcgccaaatacggcaacacggaaggcccgaaccgccgtcattccaagaagaatcgccacaatgcgccattccgtatgaagtctggacgccgttagtccgacagcgcgtatgaatcaggcccgacgacctttgatggtcgtcgggcctgattgtgttataggccggtgtttgcgatgcggatgcctgttcgcctgcctagcggccatgacgattgcacttatcgccgcagtcgttgtgatcgtggccatgccgaaacggcggtaatggcctgtacgcaccctagaataacggatatgacgcaatcgcagccccgatccaaacgcacgcccacccttgaaatccacgggagaatccttgacgcggcaaggcggatcgtggaacgggacggtgtggatggtctgaccatccgtgcgctgtccgcacaggccgatgtgtcgcccaccagcatctaccagcacatcggcggcaagcaggcggtgtgcgatgcgctcatcgacacatacttcaccgatctgcgcgaacagctcatcgccattgacgaatccgaccccgtgctgcgcctgcgcagggcgggcataatctaccgtgaacacgcgctggacgcccccggcatttacgcgctggtctggatggggcaggcgtcggactcggcccagcactgcctggacgccatcacgcagatcattcgatacggccaggcagcatctgtattccgcggcgatgacccccatctaatcgcatcctccatctgggtgtccatacacgggttcatccaattcgaactgcgttccgcacaaccccgcacacgcggccgcgaacgggtcgaccggtcgtacggttacctgctcgacctgctgatccgaggcattcagaggtgaatgagttagctccctctgatgagggagctcaccattgatacgctgtactgccatcggcgttgcggatggtgaaagtgggggattgctcgatgttgaggtccacggtcagggaatgctgggcgtcggcgctcgtcgaacgatagacgaagtgcttgttttccagcttcacggcctcggtacgcgcatccagcagccatgggttgcgacggcgcagcgcgatcagcgcctgatgcagccggtatgtcggctctcccagcgtggacagttcggcaggggagtcggggaacttcggacgtacgtcgtcatcgccgccgaaacgctcctgcttgacgcccacatagccctgttcgtcgccgtaatagatgcttggtacgccgccgaccgtcatgagcaccgccaatgccaacgccgccttggccgggccaatctgcgatgcgatacgcgtcacgtcatggttgccgatgaacgtctgcggcacgaaggaatccaggaacgcgttgtgccgcttcaagttccaatccagctcgaagaagttctccgtctccagcgcatgctggatcgacttccatagctcgtattgcgtgatcgaatccatcgtggattcctcgatgatgcgcgggtaatcgccatggatcacctcgccgaaaatccacgaatacgggtgtgcggctttgacctgcggcaacacgcgcgcccagaacgggctcggcacggcatacgcggcgtcgaggcgccagccggcggctccgcgatccagccaatggctcatcacatggaccacatagtcaacggtctcgtcagccgaatggtccagcgccaccagatccccgtgcccctcgaacacatccaaagcgggttcgccattatcaccgacatgcgcgcggaccagaccatgccacgggttgtcggccggattcaagcgtccggcggtctcgtcaagcgccgtctgaacggccggatgattgcggctcacatgattgaacacgccatccagcatcacctgcaatcccatgtcccggcaggccgcgacaagctgatcgaacgcggcatccccgcccaatcgcacatcgatatgcatatggtcgagcgtgtcgtatccatgcgtcgccgactcgaacaccggacccagcagcaggccggacgcgcctagatcgcgcacgtactccagccagggaattatcgcgtcaaggccgcggccatggaactggcgcgggccggcgggcctgatatcggcaccgcagaagcccagcggatacacgtgccagaacaccccgtacttcacccaatcgggcattgtgcggctcgaatccatgcttacaaccactgtgcacctcctgattgacaccgtgtccattttcgcacatcgcggtgcgaatcccgggtaatcggcatgaaacgcagtccgtgaacatgtggccaagctcacatattgggacattttcctgaggcgcgacatgccgtggctacgcttccaaccagtgccataagcagacgagagataccccaaaagggtcgcaatgaagagaacctttcccgcaaaggttattgaagaggaacagagggttattatgaccaccgccgcagcccaggccccggcacctggcaagttggaattcaaggacgattacacgccggacgaagccgaacgtgtgattcgcaattcgaagggactgcccgtaggcgtgcgtcccaaaatggtatggacatggaagaaggccctgctgtgggccgccatcgccatcgtatgtgcctgcggatgggcgattctggccgtctcgcgcggtgagcggatctccgccatctggttcctggtcgtggcgctgagctcctacgccatcgcctaccgcttctatgcctattacatccagatcaagatcatgcgcaccgacgacgcgaacgccaccccggccgagcgcgtgcatgacggcgcgaacttcgaacgcaccgaccgccgcgtgctcttcggccagcactttgccggcatctccggcgccggaccgctcgtcggcccgatcctggccgcgcagatgggctacctgccctccactctgtggatcatcctcggcgtgattttcgccggcgccgtgcaggacatgctggtgctgtggatctccgccaagcgccgcggtcgctctctgggccagatggccactgatgaaatgggtaagttcggcggtatgatcctatccatcttcctcgtggtgatgaccgccatcgccatggcattcctggcgctcgtggccatcaaggccatggccgcctcgccgtgggccgtgttctccatcggtatgaccatcccgatcgccctgatcatgggctgctaccagcgtttcctgcgccccggccgtgtcattgagaccacgctgctcggtttcgtgctgctcgtgctcgacatcgtcgccggcggatggatcgcctctatcccggccgtggccgccgtgttcacactggacgccaagcagctcgtcatcgccctggtgatctactcgttcgccgccgccgcgctgccgcactggctgctcgtcaccccgcgcgactacctgtccacgctgatgaagatcggcacgctcgtgctgctcgtcatcggcatcatcatcgccaacccgtccgtcaaggtgccgggtctgaccgaactggcctccacctccaccggcccgaccttctccggcaacctattcccgttcctgttcatcaccatcgcctgcggcgccctctccggcttccacggcgcggtgagctccggcctgaccccgaaggccgtggagaaggagaaccagattcgcatgatcggctacggttcgatgctcgtcgaatcgttcaccgccgtcatcgcgctgatcgccgcgatcaccatctcgcagggcgtgtacttctccaccaacatgtccgccgcacagatcaccgccgcatccggcgtgagcatctccgccacctccacgccgggcgaacaggccgatgccgccgtcaaggccgtggagtcgatgaaggtctccgacatcgaaggcaaccagatgcaggtcacctgggattccgtggacgagaacggcgcggccaagacctacgaaggcgccgcggcgcttgagcaggccgccgccgacatcggcgagacctccatcgtctcccgcaccggtggcgccaccacgttcgccatgggcatggccaacttcctcaagtcctacctgggcggccacgactcgatggccttctggtaccacttcgccatcatgttcgaagccctgttcatcctgaccaccgtggacaacggcacccgcgtggcccgctaccagatcggcgaaatgctcggcaacgtgcgcaagctcaagaagttcgccgacccgacctggaagcccggcaacatcatcaccacgctgatcgccaccgcgctgtggggcggactgctgtggatgggcgtgtccgacgcgaacggcggcatcaacgcgatggtgcctatcttcggcatctccaaccagctgctcgccgccgcctgcttcgtgctgatcaccgtgtgtgtggccaagatgggctactggaagcacctgtggataccggtggtaccgctcgtgtgggacatcgccgtgaccttcaccgccgacttccagaagatcttcgggccgctgagctacttcaccaccgcctccaagtatcaggcgcagatcgactccggcgagctgaccggcgaggcactgaccaacgccaaggccgcgctgtccaacgcgtatctggacggcgtgctctccgtgttcttcctggtcatgatgggcgtcttcgtggtagtcggcatcgtggtcgtggcgcgcacgttcgccgctggcaagtacggtgccgaaacgacgtccgaggagccgttcgtggaatcccagtggttcgcgccctccagcctggtcgccaccgcgcttgagaagaaggtgcagcgcgaatacagcgccaagctgcatgagcttgtgcggaacgggcaggttgcagcgtagtgcgtcattggctccccttttttcaaggggagccaataatcagcgaaaggagacaaaatgctcggcaaactcgttgccgtatggcacggcatcgtctggtatctgcgtgagatcagcggcgaggcccgctacgaccattatcttgagcatttcgcggccgagcatcccggcgaaacaccgatgagcgaggtcgaattcattcgcgcccgcgaggaatacgaccgtctccaccccaataccagttgttgctgctgacaggccgcaatagcataacaacaccataaaacccgcgcgccatgggaactacgtagccattcttccgttacaatcagtgtgacggcttccgcccccgaagaagaaggtgttgattccccttggacgtctcactggcgcatttcctccaacaagtgctttccaacccggctctgaccgtcacaacgttgctgacgctgggagtcatcttcgtcaacggctggaccgacgcacccaacgccatcgccacctgcgtgaccacgcgatgcatgcgcgtacgctccgccgtcatcatggcggccatcttcaacttcctcggcgtcttcatcatgacgcagctcaacgcctccgtggcctccaccatcagcaacatggtcgatttcggcggcgacacgaacgcggcgctcatcgccctatgcgcggcgctgttctccatcgtcgtatacagcgtgggcgcctcgctgctcggcatacccacctccgaaagccacagcctgatcgccggcctgtccggagcggccatcgccatccaaggcggcatcggcggcatcaacatgggcgaatgggtcaaggtgctctacggtctggtcgcaagcctcctgttcggcttcgccgtcggctggttggtatgcaaggccgtgaccctgatttgcgctggcatggaccgccgccgcaccaacgggttcttcacctacgcgcagatcgtgggcgcggcggccatgagcttcatgcacggcgcgcaggacggccagaagttcatcggcgtgctgttcctcggcatggcgttctgcaatggccaacccagcgtgaccggtgtgatgattccggtctggctcatgattctgtgcagcaccatcatgggcgtgggcacgtccgtcggcggtgaacgcatcatcaaatccgtgggccaagacatggtgaaactcgagaaataccaaggcttctcggccgatctgtcaagcgcgctgtgcctgctcgtcatgaccgtgctcggcatccccgtctccaccacgcacaccaagaccagcgccatcatgggcgtgggcgcggtacgccgcctctccgccatcaacttcggcgtggtgcgcgacatgatgctcacctgggtgttcaccttccctggttgcggtctcatcagcttcgtaatggccaaactgttcatggtcgtgttctagaaaggaatccacccatcatggcgagacaaaaagacacgttctacttcgacggattccgccgcagcgcggactacgcatgccaggccgcgaagctgctgtccgaggtcatgcacgacttcaatccgggccagctgcgcgaacgcatggacagcatgcacgcgattgagaagtcagcggacgaggtgcgccacgacatgatggacgaactggtgaccgcgttcatcacgccgttcgaccgcgaggacatcgacgagctcggccacgtgctcgacgacgtgaccgacagcatcgaaggcgtgctcaaccgcatgtactacgacaacgtgaccgacatgcgcgacgacgcggtccagatgtcggatatggtggtgcgcgccacggaaagcatctgcgagctggtcaacgaactgccgcgattccggcattccaagacgttgcgcgaactggtgttcgccatcaacacgattgaaacggacgccgaccacctgttcatcgagtcgatgcgcacgctgcacaccacctgcaccgatccgctgcaggtgttcgcctggcatgacgtctaccgtcacctcgaacagtgctccgacgactgcgagcgcgtggccaacaccatcgacagtatcgtcatgaaaaacagctgaggttggtttttcacaacctccctctgatgagccgagccgtgaagaaaacgccggaggcgtttttaggcgagggtgagtgacaacgagcgaataagaggtcagctgcaagctgtcctgaatcgcgttcgaggtggcatcgcgaagcgatgacggagggggagacctacttgaccaaaagccccctcacctatgggcgttgagccagaggatggcgagttgggtgcgattggtcaggccgagcttgtccagtatcgcgctgatgcgattgcggaccgtgccttcgctcaggaacagtctggcggcgatgtcgcggttatcgaggccctcggcgaccagcgcggtgatctcacgttcgcgctcgccaagcaggccctcgatggaatcggcggtatctctggaatcgtcggaatcggcaggatccggagttcgttcggtgagcttgccgagcacttccgcgccgagcaccacctgaccggccatcaccgcctgcagcgcaggcccgaccgccgccacatcctgtttgatgagatagcccttggcgccaagtcccatcgcctgcgcgatatacgactggtccgcaaacgtggtcaggaacagtatgcgcgcggccgggtccgtggccagaatctcgcgcgcggcatccaaaccgctggtgccgggcatctgaatatcgatcagcagcacgtccggtcggctcgccggtgtctcgaaataacggcgcacggcggcgtcgccgtcatttgccgtccatagcacctcggccgtgccggtggccgtcagaatcgtctccaacgactggcagacgatcggatcatcatccacgattgcgattctcatcaatccctcgattccatggtccaacgcttcttcggcacggatacgaacacacgccagccgtcctcatacggcccgcagaccgcggtgccgccaagggcgcgcacgcgcgattcgatatccgccaaacccatgccgcgcatcagctcatcggccgaaccacgcatatcggcaacgccgtcggcggcgagtcgcgagccgacgtgcgtggcgcgcatcgcacgcgggcggacagcggccgtccgggacccatcggactcggacacggccggccccggatcctgaatgaccaactgccagaacgcggggaagtcgcgcaacgtcacgctcgcctcgtgcgccgcgctgtgatgcaccacgttcgacaacgcctcgcgaatcacggtcgcgaaacagcgcgagaccggcgcgggcgccttggcgatatcgttggccagcgtcacggcgaaaccgggggagatgccgtcgaacgacgtgacggcatcatcgatctgcgcggcgaaatcagtgccatcatcctcaagatcatgcaccgaacggcgcaccatcgtcatcgcatcatccaacgtcgcacccaacgtggcgaacccttgcgcagcgaccgtatcgttcgtcgcctcggccaccgttttgccggcctgagcctgcatgatcgcgcgggtcagcagatggcccacattgtcgtggatctcccgggcgatacgcgtgcgctcgccgagggtcgccatgcgaaccgactgggcgcgttcctcatcgatgtcggcgatgcgcgaacgagtggcccgcgaggattcgcgcgccctgtcctgcgcgtgcagcaacgcgcgccgcgcctcgtccgaggaggcgcgggcccggcccagaacgaatccaagcagggcgaccagcgtcatcaccagcgtctggagacggtcggtgccacgggtgaaccagagcgcgatcagcggcaacacccatatccagcgcgcggcgaccgaaagccgcggggccgaacgtattgcatcggcaagggaacggtgagaggccgcggtccgcaagacactgggggagcggccgcttgccgcagtccgtgccccagttcgggctccggccgaggcgagggccggcagccgtgcggtatcgtaggcgatgagcggcatgaacgcgcaccatgaaggcaccgccacggcgatgacgagatacgccgtacacaagacccaagaccattgcgcgggacgcagccattccaccaatccggcgacggaaacggccaacagcaggccggcgatgaacacgctatcgaaccgtaccccgacaagccaggccaaagccaggcccaacacgagtagcaagcccatctcggccaacacgcgcatggcacctccccggctcgacgctcttccaccaccagtctagcggtgtgcggaacacgacgaacttgacgggcgtgcggaattattcgcatgacggtccaagacaacgggtctacacttcccgaatagatgaggcacaagcgtcggatgtcgtcgacacaaccgtaaagggatgataccgatgattacgcaaagccacagggcgtccaactattcgatggacgagatcagcctgatgccggtcgataaggtgtacaaggccatgcagaccgacgccgaaggactgtaatgacaaatgtcacgcctgtacggccaagtcgtgacgtttgcctgtggcggcgtccggccccttcttgggatgatggaatcaccaaggaagggagtggctatgacaaccgacaacagagcttccgaacacgactcgacaaccaacccggctctggccgtgcacgtcagccaactggtcaaacgctacggcgacatggtggcgctcgactattttgaccttgacgtgaaccagggcgagattttcgggctgcttggaccgaacgggtccggcaaaaccaccgcgatcaactgtatcctcgcgctgctcacctacgattcgggcacgattcgcgtgttcggccagccgatgacgccgacctcctacgcgctgaaacgtcgtatcggcatcgtgccgcagaacgtggccgtgttcaacgaactgaccgtcaccgaaaacatcgactacttctgctcgctgtacgtgccgaagaaaaccgaccgcgcgccgctggtcgaggagtccatcgaattcgtcggactccaggacttccgcaagttccggcccggcaaactgtccggcggtctgctgcgacgcctgaacatcgcctgcggcatcgcgcacaagcctgacctgatcttcttcgacgaacccacggtcgccgtcgacccgcaaagccgcaattcgattctggaaggcatccagcggctcaaccaggccggcgccacggtgatctacaccagccactacatggaggaggtcgaacagatctgcgaccgcatcctcatcatggaccacggccggcacctggcgctcggaaccgccgacgagctcaagaacatgatcgacacgggcgagcgcatcaccatcgaaacgctcgatctggcggattcggcgatggccgaggtccgtgcgctgccgtgcgtgatcgaagccacctacgacggcaaggaactcgacgtgcgatgccgtcgcggcgaacacaacctgaccgacgtgctcgacgcggtgaaacgctccggcgccaacatcggccacctgaccagtcgcccgcccaccctcaacgacgtgttcctcgaactcaccggcaaagcactgagggactgaccatgctcctctcagtcggcaagcaaataacctggctcccctctccgaggggagctgtcaccaaaggtgactgaggggagttcctgagtaaggagacatcatgtggaccacatttctggtcgcattgaaagcgaacttgcgtaaccggtcggcgttgttctggatgaccgtgttcccgattgtgctggcgaccatgttcaacggactgttcggcgggctggccgaagcatacgaactcaagccggtgccgatggccgtcatcgaagacacccgttggcagcaggcggacggtgcccgcaccttcgtagacgcgctggctggggaaacggaatcggcctcagacgacacgacctacgccgaaatcgaccaaaagctgctgaccatcaccacagtcggcaccgtgaaggaggccgaacaacggctcgccgacggcactgccaacggctatctgaccgccgacaataacggccgattggcgatgaccgtgagccgggaaaccgccgtcacagccaaggactccacgcaaaacagcggactggacattagcctcgcggccctgcgcagcgtcatcgacttgtacaaccgcaccgacgccgtcacccggcagaccatcgccgacaatccacaggccgcgctcagccggaacttctggaacagcgtcgggcagaacgtcgacatgacccatgagacgacgctcacgcattttcagcctgacgagatcgcccgatactattacgcgctgctggccatgtcctgcatgatggccatgggatactccatcagcacagtcgccgccgcacaggcgaacctgtccgcgctgggcatacggcggaccgtagcgccgctgagccgggccaaacagctcgtcgcgggcttcctctcctgctggctgtgctcgtcggtcgccctgtccatcgcattggcctatatccggctcgcctgcaacgtctcgctcggcggacgcgaaccggcggcgatcctcgcggtcatcatcgcctcgttcatgaccagctcagcaggcaccctgctcggtgcggtgccgaagctctcgtacaacacgaaatacgggctgtcgaccggcatctcctgcacgctgtcgctgttcaccggactgtacggcgggtttgccatgcagatcagcgactggatagcccgcaacgcgcccatactcggcaccatcaaccccgcacagcaggtgacgaacctgttctacgacatcctgtactacgacagctaccggccgttcatcaccacctgcatcattctgctggcgatgagcgcggtattcctcttggccggcatcgcaatgctgaggaggcaacgttatgaacacctgtaaagccacgctgcgcgtgctgttcgcgcaccgggtctacctgatgatctacctcgtattcataggcatcctgatgatgtccatcagctgggcgatgctgacctccgcatccggctccatgtccgcggtgttcgaatcgaccaagacgcgcgtcgccatcatcgaccgcgactccgaccggggtgatatcgccacgtcgatgcgcgcctacctgcgcgattccagcgaactggtggacctcgacgacaccagcgaaacgctgcaacaggccgtcgcctcgaactgggtggacctgatcgtcatcattcccgacggattcgctgacgattatgtcgccgcggcggcggacggcgacaatccgccgaacgtggacacggttaccagctacgcatccggctccgggtcgatggcgcggatgaacgtcggcgggttcctctcgctcacccgcaccgcactgatcggcgcgcagacgagggtcgaccaggcggcgctcgccggcatgatgaacgctacaggaggggccgccggttttgatggcgcgagtctggaccaagacatgctggactcgttgccggaagggcaagtcgacaagccggatatcaaggatctgtcccaggccgccaaaatggccgccgaatcggccagcgatacagacgtgaaccatcagatcgccgtggtcgatacgctgaccgaggagtcggcaagcgctgcggatacggcggtcagcggattcggcggcaccatgaaaaccgcgctgtacccgctgtccctggcgatgaccatctgcggatcgatgatcctgggcgcgttcaccaccggcgaggtgcggcggcgtctcatcgcctcgccccgacgcatggtcctgatgggactccagcggttgctgacgttgggcggattcgcgctcgtcgtatgcgtcggctatttggtgctgtcaatcggtctgatgatggcggcggggctcgatccgttgcgcctgagcgtcgggggagtgctgatgacgttcggcgcgacctgcgtgtacgcgctgatgaccgtcgcctgcggattcatgctcagcgagttcgggctctcggaagaggcggccaacgggttcgccaacatcttcggcctgctcatcatgttcacgtcgggcgtcgcattgccgattgacatgatgcccggcgtgatggtgaccatagccaagttcctgcccggctggtggtattgcaccgcgatcgacaacgcgctcggcttcggcacggcggcggaaaccggcataagcgtcgccggctggtccggctcgctgggattggtcgcactgttcggcgtgatgttcatctgcatcggcctggccgccggccgcttccgccgatcccgccccgccctggccgcgcctgccaccacgcagctggccgagtgagaaatcagcctttcaaccgataccgctgtaccgggtcgtcggcgaacttgacttgggcgacccgcccttccttcatcagctcgcgcataccggatgtggcggccagcggcgtcaactgcagttcgcgcatgatctccttgacgctcatggccgaatgccgctccagtacggtcataatcgccttgaccacgtcgcccggcgaactgttcgccatcgtgcgctgcttggtgatggtcatcgtgaacgtgttgatgtcgttgcgcgtggtcgccggctcgatgccggcctcgcgcaacgcggcggcgatgcgctggtagccgtcgccgccttccgggttcacaaacccgccgcccggatacggcgtggactccagcagcgtgaacaggaactggtttcgggtggagacgaacggcgcgcccgtcaccggatgagggctcgccagcacatcatgtgtcaccatgccgtacaggccacccggattggtgatctcgatgcgatcggtgaacacgctgatatgcacctgcgtgccgcgcgcatcgggcgaataatcacggtgggtgagcgcgttcgcaatcgcctcgcgcaacacgagcggcggatagtcgggcttcttcgcgccaatccaacgcatcaacgagtcgaccgcatcgtcgatcatcaccggaatcgaaccgaccaccgacttcgaggcgaccaatcgttcgtcgccccggaacacatcgtcccggctcgtccccggaaacacggctatcgaaatgccgagccgcggatagaacttctgcggatagcggcccaacgccagcagtccggccaaggtgggacgcagtattccgacgacctccgactcgtcggaatcatcatggcgcaacacctgcagatccagcagcacatcgatgccgtctcggtcggcgaacgcgcgcggatgctgttcgcgcacgcgcgccaacaatccggaaacgagctgcgggtcgaggtcatcggtcgtggcgtcgggcacgatatccagatcgtatgtgggctgcagatgctcctcgatgagccggtcgacctcataggaggtcatgcgccggtcgccgtcgccggtgcggatgaacgagccgccgtgcggtccgagcgcggtggtgaagcagggtttgtcgcgcggcagcatctcgtcgatgcgcgcgaacaccagattcgcgccttcgaacgggcaggtgacgatcacgggccgcaccaccggcgtcatcttctcgcacgcctggctcagcgcctcctgcatggcgcgcgcgtcgaatccctcgaccggcgtgaacccgttcttttcggacaggcccaggataatccagccgccggagccattggagaacgcggacagcgtatcggtgatggtcgaggagatcttgcgcttgcattccttgacctcgcactgctgcgtatcgttgccgatcagacgcatgagttcgatcagctcagtcattttggcagtatagtcatcgaccatggcggcctccttgacaccattgtgccccataatccgccgcccgctcgcctccagccccgccagttcaccccaattcatgcagaattcatgggccaaaccagacgaaacgaacgtcgatgtagggttcgattccgcgtgttcgctgatgatatcggccggtcgaggcgggcgggctatgttgggtggcgtgggaatcttgcgcgtgattgatgctacggctgtgtgcttcgctttgggtatatccggcccgatcagcgggactcagccaatgtgatgccgcccgcagccatctgcttgcgggccgcgacaccaagttcctcgctgaccggcacggtcagatcctcgaacacggtgacctcgaagccgagcttcttggcatcgagcgcggtgtccttgacgcaatgcgattcggcgatgcccactacatccacgcgactcacgccggcggccttcagcgcgttggccagcgtcttgccggcggattgctcggcctcgacctcctcgcgggtctggatacggtcggtattgtcctcgatgccctcaaaaccggaatatgccgccgaatactggcccttcttgaaatgatgctcgatattcagcgccttgatcgccggatgcaattcggcgttcagcgtgccggccgcaccatgcttcggccacgtgtccacgaaatccggctccgccgaccagtgcgcgcccggctcgatatgccagtcctgcgtggttgcgatatacgcgtactcgctgcgatgcgcgttcacataatcggcaatccgctcggcgaccgcgttgccgcctgcgacacccagttcgccgccttcacagaacgtcggctgcacatccaccacaatcagtgccttggtcatcgtcattccccttattgccttggattcgttttgaatattgtctcgaactcgacgtgcgattgctctcatcatagccatgcgcggccctgtgggaaacgttcgggcttacactgcaagcagcaatcgaatacaagaaccaggggagggcgaccaagaccatgctggaccatctgacgttgcacgtgaaagacatcgaccgtagcatcacattctacaaacaggcgctcgcaccgctcggctatatcgtcaaggcgcatcatgagcccacgctcggattcggcgtggatgacggaaccctgcactccgatttctacgtgtcaccgattgaagggctggaggcggaggcttcgccggtcacgccggtcacacacatcgcgttcttggctgacagtcagcaagccgtgcaggcgttccatgcagccgcgctcgccgccggcggccgagacaacggcgctcccggtccgcgcccgtaccatcccggctattactccgcattcgtgctggacccggatggcaataacatcgaagccgtcgtggattgggctcattcgaacgagtaaaaacatatccgtatcgtgcctcaggcggcatcgacggcgtaggctccaaccagtcggatttgtggtcgcaacggcggtataggtcgcatcacgcaagcgtgaaggtgatggtctgctcggcggtttcggtgccggtccatgtgccggctttgcggttccaatccatgccgtccgcgtgcagtgcgtcaatgccgtattgacgtgcatgcgtgaccagccagcctgccgtctgccagcaaagtcgagtgcggttgtcggcggacaggccgtccggcagcgtgatcgccaacgttgtgctggccgtattggtcgcagcgccgttgttcgtgccggttttgccatttgggggcataatcgagaccttgacattcggcagtgtacctcctatggcggcaaccaacccgtccgcgtccgaggaggttgctggctccaacgcgcacgtgacgcccgccgactgttcaccggtcagccccgaggcccaagcgcgtgccatcgcatcccatgtggcatatagttccgggtagcctgagcgctgcacctcctgcgcggcgtcctccaccggaatcgtctcccaatccggcacctgcagcagatggtcgtagaagatgtttgtcgcataggtcatgtcggacacctgctccgccgtgccccagccttggctgggccgctgttggaacaggccgagcgaatccaagtcgccgtagtccagattcgtcagcctcgactcctgcatggccgtggcgatggccaccgtcgccgcgtgatccggcagtccgcgcgtgacggcgatgttcgcaatcagcgccgcgttctgcgcctgatcaggcgtcaaggtgcggcgggctccgtcggacgacactgccgcgcaatatgcttcctcggccgtgcgtgcggtctcgtgaggcgtgaatagccgtggcagcagcgtccatgccgcgatcagcgccgcaacaacaagtatgacggctgcaatcagcgcgcccgcgccatgggagcggcgtctgccgtaccgcacctgttgtcccattgcgcctccaatatttcggtgtcatggctgaccgtgaccggctggcctatgcagcatgcgggatttgccgtgttccggctcggccgtcatcatgacagcgtggcatatccacctgaacggcggctgcgtcatcacgcgactttgtgacaattcttcacgcttcatgacatccacgcaaatcagcccctcgaaaccgagaatggcggtcgggattgctccgacaccaagggagctgctgccgctattgtgtgaagggcgatttgtaccgggttgaaggagaggaacacatggcacaattgcagccgtactgcgcgattgagggcaatgatgatggattgcccgtcgtgttcgtgcatggcatgggtgtggaccatcgttcgctgatgatgctcgacaaggcgtttgacggcaatgattcaattcgacgtatatatctggatctgcccggtttcggccgtacgccggcattgcccgagcatgcctgcggactgccggaaatagcggattggctgcaaacggccattgacggtcttgtcggtaaagcggctccattcgccatggtcggcaactcgatgggcggtgcgcttgtccgcgaagtattggcgcgcgaacctcgccgagtggccggtatggcattgatcgcgccggtcgtggacccgcagcatgccggccggcatgtggccgaacatgtggttgcacagcccaatcccaagctgacgcactccttgccacaggaacaggtgttcgatttcattaccatgggcgtcaaccagtcattcgacgcgtggcgacgctaccaacggttcatcctgcccggcgtggcgttgtgcgaccgtgcggcatgcaaacgactggatcagcgctattggctggccgataatcccgaggaaatgctcggcatatatgcgggtccggtgctcatcgtcaccggcaagcaagaccagatcgtcggatacgaagatcagcaagccctgttgccgcactatcccaacgccaccttcgtgacgttggacaatgccggtcacaacgcgcacatcgaccaacccgaagccgtcatcacgctcgtgcgcgaatgggtggctcatatggcgttcgctccgttgagctgacggtctgctgacagtctgccgaagcctatatgcatatgagcgaccaatgccggttgacgcaatacgccttgcaaggtatatcgtttttcgatatagtcatatcgatgttcgcggtgtcgccaaaaaaaacgtcggcacctgaaaggaccgggctatgaaaaactacatgaaccgatgggtgttgctcgcgttgaaagccatcgtgattctggtctggctggcctgcctatggggccaactattcgccgtaccgggattgagcggcgcgctggccggcctctacccgagccagacgtcgatgcactggccatatctcattatgggcgtgctgttcctgttctgcatcgaagcggcgttcgtggccgtatggaaactgttctccttgtccggctcgggcgcgaactcgagcaggtgatttgagatgacgattcgcatcaatctcgacgtcatgatggccaaacgcaagattggcgtcggcgagctcgccgaacaaattggcatcacgcccgccaacgtgtccattctgaagaacggacgtgccaaagccgtccgcttcaccacgttggacgccatctgcaaggcactcgactgccaacccggagacatcctcgaatgggaagatgacgattgatcgacacgccaccggctcgaactcatggttcaacttgtagtctctcccaaaatcaatgatgccctatcatcctgcaagacgatagggcatcatcatgtgattatgcgcagctgatatgttgcgttgttatcactcggcgtccgcggccggtgcctccttgggcgcagagaggaagtgctcctcgctgggcagcacggtgttcaggatcacggccaccacgaacgccacggcgatgcagttcgaggcgaagatttgttggaacagtgccgggaactgcgtgaagatgtcgctcacctgggtgaagccgatgccgatggtcagcgaaagcgccgcaatcgtgatgttgcgctgcgtgaagcccgcctcggcaatcatctggaagcccgaaagaatgatgttgccgaacatcatgatcgtgcagccgccgagcaccgcctgcggcagcgagttgaacacctcggcgatggccggcacgaagctcgccagcaccagaatcagtccgccggagagaatcaccttgcggttgacgaccttggtcatggccaccaatccgatgttctgtgcgaacgaggtcagcggcagacagccgaacaggccggatacggtggagatcaggccgtcgccggcgatggcgcccgcggtctcgcgttcggtgggcgtacggttcaggcccaccttggtcagcgcggcggtgtcacccagcacctcgaccgaggagacgacgtagagcaggccgatggagatgatcgagccccagtcgaactcaggcttgaacggcatgaactgcggcacggacacgatggcgaggttctggaaaccggagaaatcgaccttgcccatgcagatagccgccacatagccgaccaccagaccgaacagcacggacagctgcttggccgtgcccttcatcaacagctggaacgccaggcaggcaaccaaagatataagcccgagcgtcaggttctgccaggaaccgaagtccttggctccgctgccgccgccgaagctcgtggcacccacgttgagcagcgagaagccgatcgacgtgaccacgatggcggagacgatgggcggcacgaaccgacgccaatacttggccgtcaaacccagcacaagttccagcagaccgccgaccattaccgcgccgaccaccgcgccatagcccttgtccgcgcagatcgccacggcggccgccacgtaggtgaaggagatgccggtgaccatcggaagtcgcgagccgatgagccacgcgccgtacagttgcaggcaagtgcccaggcccgcaaccagcaggccggactggatgatggtggccgattgggccggggtcatcttcgcggccgaggcgacgatgaagatcggggcgaggttcgccacgaacatggccatcacatgctgcaggccgaatggaatgcccttccagaaggatactggcgcgtccagcgaagacaacgcctcaaaggatacggaatgattggttttcttctctgacatgattctcttcttctctctgttgctcccgccggcgggagcagccaatgtgctcagtgcctaaatgtgatttcgccggtctcgggattcatggactcgacgatggccagcgaatccacatcgtagccttcagcgcgcagcgcgtcaccgccgccctggaagcccttctccacggcgatgccaatgccctcgaccgtggcaccggctgcttcgcacagatcgatcagaccgcgcaacgccttgccgttggccagaaaatcgtcaataagcagcacatggtcgccggcgttcagatacttcttggccacgatcaccgggaactccttctgcttggtgaaggaatagaccgtggtggtgtactggtcgccgtcaaggttgatggactgcgccttcttggcgaacaccaccggcacattgccgaaatgctgggccgccacacacgcaatgccgatgccggacgcctcgatggtcagaatcttggtgatgtgcttgccggcgaaatgagcggcccatgccgaacccatgcggtcgaacaggcgtacgtcgcactggtggttcagaaacgcgtccaccttgagcacattacccgccttcaccgttccctcgctttggattcgctcctcaagttcctgcattgaacctcccattgttgtatgtcagtgaatgatatggatactcgtaagtgtacgttgtcctgcgctgacccgtgcatgtggtaaacatgaatgtcgcgattcaaagggaggcaacagtgtacgacgagccggaagtcatcgcacgcagcgcacaggaactcgtgggcgacctgaacccgcagcaggcggaagccgtgcaataccgcggtcaggcgctgctgatcggagccggtgcaggctccggcaaaacccgcgtgctgacccgccgcatcgcctggatcttgagccagttcggcgcatggccgagccagattctagccatcaccttcaccaacaaggccgccgccgaaatgcgcgaaagactcggctcgctgatcggcccggtggcccagcgcatgtgggtctccaccttccactccgcctgcgtgcgcattctgaggcgcgacggcaagtccatcggactcaagtccggcttctccatctacgattccgccgactccgagcgactcgtcaaaatcatcgccaccgaattcaacctcgacatcaagcgctacactccacgctcgattctcggccatatctccgacctcaagaacaatctgaccggttggaaggaaaacctcgccgttcacgcgcccgacttcacgcccggccagcgcggctaccagttcggcacggtgggcgaccttgaagccatctacgcggtgatctacgccgaatacgagcatcgcttggccctggccaacgccgtcgacttcgacgatctgatcggccgcacggtcgagttgctgcgcactgacccggccgtcgccgagtactaccatcaccgcttccgttacattctggtcgacgagtatcaggacaccaaccacgcccagtacgtgctcgtgcgcgagctggccggcgtggacacgggggagaaggccatcccgggcgcgcctaacgccggcaagtccggccccgcctggatcaccgtggtgggcgattccgaccagtccatctacgcgttccgtggtgccgacatccgcaacattcaggacttcgagcaggacttcccgaacgccaagaccatcatgctcgaacagaactatcgttcgacgcagaccattctggatgcggccaacgcggtgatcagcaacaacgagggccgcaagcccaagaaactgtggaccgcgctcggcaagggcgagccgatcgtcggctacgcggcggacaacgcccagcaggaggcccagtgggtggccaccgaaatcgcgcgcctgcacgccgaagcgggcatcgcctactccgacatggcgatcatgtaccgcgccaacgcccaatcccgctcgctcgaagaggcgctgatcaacacgaatcagccgtatcagctcgtcggcggcaccaagttctacgaacgtcgcgaaatcaaggatgcgctggcctatttgcaggcgctcgtcaatccggacgacgatgtgaatctacgccgtattctcaacgtgcccaagcgtgggcttggcgaccgcgccgaaggcgtgctgctcgcctacgcgcgcgagcatggcaccagcttcttctacgcactcatgcacttggatgagatcgaggtgccgacacgcaccgccacctcgctacgagcattccgcgatctgatgggcgcgctctcgcagttcacgcgcgcgcacgactccaagcccagcgagatcgtggccgaagtattggagaagtcgggcttaagggccgaactcgagaaatccgtggacccgcaggacgcctcccgtctggagaacctctcccagctgcagtccactgccgccgaattcgaacagaacacgcctgacgccacgttgtccgcattcctggagaccaccgcgcttgtggccgactccgaccaactacccggcgaggcggaggactccggcaaggtgacgcttatgaccttgcacaccgccaagggcctcgaatacccggtggtgttcctgaccggcatggaacagggcaccttcccgcattcgcgttcgatggaagacaccactgaactgcaggaggaacgccgactcgcctatgtgggcatcacgcgcgccaagcagcgactgtatgtcacgcgcgccgccgtccgctcccagtggggccaggccgccgatatgatgcccagccagttcctcgacgagattccggattcgctgattgattggaaacgccgtgaagccggcgtggagcgtatgcgcgccagctgggagaccgatggattcgccgacgatttgggcggctgggatgatgacgattttggcggcgccgcgtttggcgggtcgtcgacgttcggctcgcgtggttcgtccggttcgggttcgtcctatgggtcgcggtcgcggtatgggtcgtcgtatggctcgggttccggctcttcgtcgtatggttcccgctcatcgtcgtatggttcccgctccggctcgtcctcctatggttcccgctcccgttcgggttcgtcctatggttcttcaggctccggttcgaggtcgtcctacgggtcgcgttcccgttccggttcttcgtccggttcatatggtggcacccgtggcggcaaggtcaccacgcgtcgtaccgcaccgaaatccgattcgaccggctctgccgtgcctagctcgaagctcaccaaggacaatggcctgaatatcgccgacttcgccgtgggcgacatgatcagccacgaccagtacggtctcggcaaggtcaccgacgcacaagacaagggccgcaattcggtaatcaccgtggacttcggctccgccggcgtcaaacgcctcatgctccgcgtagcgccgattgagaagttgtagataaattggcccctctgacgaggggctgagttatataccaaataaattcgcaaaaaacaagacttgtgttcttcatcacagtgtgggcataatgcggaggttgtgcctacgagccctgggaacaggggagaggaaaaagtagttatgaagaacaagctgtttgcatccgtgcccaatattctgttcggcgcgctgatcaccatcgcgccccagacctttgcgcacgcctgcaccggccatgacatgccgggggcctgccactactcgcagcaggcggccaccggcatcggcgtcgtcatcctcgtgttcggcgtcgtggctttgttcgtcgccccgcagattcgcatcggcctcaatatcgccgccgcagccgacgccctgctactactcgccgtacccacctttttgatcggcatctgcaagggcgcgatgatgcactgtcgcatggttatgctgcccacgctcatcgtgctcggcgtgctcaccatcgtgttcgcggccatcgccatctggctcgactctcgcgccgccaagcgcaactgatcgagcagacggccggagcccagccattccgaacgctggactccggcctcgcttattgcaaccgcactataagcaacataaggattcatcgtgccatcccatatcgcattgcgcggccttccgattgaaaacctcaaacgcaagccgttccgcaccggcgcactgctcgccgtcgtcaccatcctcgcgctgacattcttcggcggcaccatgctgaccatgaacctcaacactggcatgaccagtatggaaaagcgcctgggcgccgacctcatggtcgtgccgcaaaacaccgtgcagaaggccgaagcgctgctcaccaacggcaatcccagcactttctatttcaccaaagacatcgccgacgaggtcatgcaggccgacggcatcgcacaggccaccgaacagacctatatatcatcgctggccgccgcctgctgtgccgaaaagctgcagatcatcggttacgacccggacactgacttcgtcatcgaaccatgggtcgcctcccagttcgaaggcccccttgaagacggtcagatgattgcaggcgcaaacgtcaacgtgtccaccgacggcaccatcgaactctacggccgttcatggccggtcgtcgcccagctcgccaacaccggcaccagcctcgacaactcggtgttcatcaaccaaaacaccgtgcccgacatggtcgccgcctcggccaaggtctccaagcaggtcatgtccgccgaatatgccggcaaagccgtctccaccgtgatgattaagacgcagcaggggtacgaagcgcagaccgtagctgagaacatcaagcgtcttgattcccgattcgccgatttggggtacgtataccccggcggcatcaccgccaacaccagaacttcgctgaccgcgcttgtcacctacctcaagattttcgtggcggtgatctgggtaatgggcgtgattgtgctgctcgccgtattcgcctcgtcggtgaacgaacgcaaacgcgaattcgcgtccctgcgcatcatgggcgccacgcgcggcatgttgaatgccatcattctgaaggaatccgccatcatcggtctgatcggtggcgtaatcggcgtcggcgcggccagcctggtgattttcccattcagttcgctgatcggcaaacagcttcaattgccgtatctgcaagccagcccggttgcggtgatcggattcattgccgtgaccattgtgtgctctacggtcatcggcatcatcggttcgctggccaccatgtggcgtctcggccggcccgaagcctacctgaccctgcgagagggggagtgatatgactgagacaactacgccgcttcagccgaccacggttgagccgaccaagctccagccgaccacgccagctcagccgaacgcgccgactgcgccggattcgccgcacgtaaccgagacgccctccccggaccatctgctgaccttgacggacctgacccgccagttcgtccgccgcggcacgccgttcgacgccgtcagccacgtgaacctcaccgtcgatgccggcgaattcatcgccatcgtcggccggtcgggcaacggtaaaagtacgttgatcaacatggtcgctgggctgattcgcccgacctcgggaaccgtgagcgtggctggacgcaatgtggccgacttgggcgataaagcactgtccgtgctgaggaatcgcaccatcggattcgtgactcaaagccagaccctgctcggcaacctgaccgtgctcgacaacgtgattctgcccgcaacgatgtttccggagccgctgccgttcgcccaaaacgcagaagcaacggatgccgtggcgcaagccgctgccaccaatgatgaagcggccgccgattcagccgccgacccgttcatgccggatgtcattgcgccaatcacagaccaggaaaacacgccgtcaaacacggctgcgagccgttcggacctgttcgccacccgagctcgcacgctgttcacccagcttggtgttgccgatctggcagacagctacccgcgcgagctgtccggcggtgaaatgcggcgcgtctccatcgcccgcgcgctgatgaaccagccgagcttgctcatcgccgacgagccgaccggcgacctcgaccaagagagcaccgacatcgtaatgcgtctgctcagagaccaagccaacaacggcacggcgattctcatggtcacccatgatcccgatgcactcgaatacgcagatcgggtgtatcgcatggacgccggagtgctgtccatagcctcggtgtaatatggtctgctggtgtctgccaacaggtagataccgtctggagtcatagcccatcagcgggtcggcggtaggtaatcgcaagaaaaccaacccgttcgtgtttattcacgacgaagcgctggggaggcccgactcagcgcttgttaggcatatgcaaggcaagcgttccgttcagataacgacagaaggattaatccaatgacgaacgttcagcgttctcgccgtcaggtgcgtctgtctcgcgccctcggcatcgcactgacccccaaggctcagcgcatcttcgaaaagcgtccgtacgctcctggcgagcacggccgtgaccgccgccgcaccgagtccgattacgcggtgcgtatgcgcgaaaagcagcgtctgcgcgctcagtacggcatctccgagaagcagcttcgcgccgcttacgagaaggccacccgtactgccggccagaccggtaacgccatgctgaccgacctcgagacccgtctcgacaacctggtgctgcgtgccggcttcgcccgcaccaccgcccaggcccgtcagttcgtggtgcaccgtcacatcctcgttgacggcaacatcgtggaccgcccgtcctaccgcgtcaagcccggccagaccattcaggtgaaggccaagagccagaccatggttccgttccagatcgccgccgaaggcgtgcaccgtgacgtgctgcctgcggtccccggctacctcgacgtgaacctgccgtccctgaaggccactgtgacccgtaagccggaggtcgaagagatcccggtgcaggtcaacatccagtacgtggtcgaattctacgcccgctgatccgggccctctggtcaacaaattcaggacataccgctcgaaccccgcgcttctttcgagaagccgcggggttcctgcgttgtagggcgattactggccgcacaccgcctggcgaatcatcgtcgcgtacgcataggcaccggtcatattcggatgaatgccgtcatcgttgaggtattcgctatgaccttcgctatacccatgccaatcgatgatgcccacgttcttgttcttcttggcggcctcacgcagcatcgtattgttgttgttctcctgccacgggtatggcatacggatggtgatgaagtatgtcggcttgccgccggtcaggtcaatgagctgttgcacttcctgctcattcgaaatcacgccgttcgtgccgaggccaaacaccaccacactgccactgtggccggcagcggtgtcctgctgatacacatccaccgcctgcggcagctgacggttcggcaggccatcgataaaagcgttcgggaatgcggcctggatggcgtccgaagtacccgacgtcactgaatcgccgaccatcatcatatccgcgttgcagctttccgttgccggatcataggcgtacttcgaaatgtcaagattgtttggcaccttttccgcaatcggtttgatgatgggcggctgagaatccgaaccgttcttattcgcgtcagcggtattggtttcgccgttcgcggcatttatggcagaagactcgggctcgggcttcgccggtttcttgaccggcttggcgggtgccgcgagttcggggcgcagctgaatggctcgcgcttgagcgatgccattccagtccaccggtgcccacgtcagcgccacaacggtcaccaatccgataaccgacatgacccacgcgcccgggcgcagccggtagccggctttcggcagcggcttggcgtgttggctacgaggcatctgcaccgatttacgggccgcctcgaccagctggtagaaggcttccgacgccgccaacaccacgacggcctcaagaacccaaccccaccacggcaacgcctgcgttcgtgtcgccgggttcatgaactgcagcagcggataatgcatgacgtacagcgagaacgatcgcgacccgatatagcgtaggggagcacaacccagcacgtgcgaccagattgagtcattgttcacggcacaggccaaggcgcacaacgatatgaacgcggtaatcaggtacccgccttggtacatgtacgacagatacccgttggcgaaccagaatccggtcagcagtgccgccaaagccgcggtgccaagaacattgcagacgatagtgagacgggcgcccgtcttgtcgccggcctgacgttcgatctgcactgtttgcgaagccgctccagcttccgcagcttccgtacctcgcgaggaaggcgcaatccagatagccaacagcgcgccggcggccagctcggcgaggcgagtatcggtaccgtaatacacgcgggaggtattggccgggtcaaacagcagcaccatgtcggcggtggaagcagccatgatgacaagaatcgccatggagcgcacccatttggacttggtgattttgccgagcaccaccatcagcaacggccaaaccagatagaactgcatcgtcacgcccaagaaccacagatgggtcagaggagaaggcaatccggccgcctcgaaatacggcaccttgcggaagatgtacacccaattgctggcgaacaaggcgctcggcagcgaatcggaaaccactttctgcaacaggctgggagcgaacatccaagtgagccaaggcaccacggcaatggtcgccagcatcaccggccataaacgagtaatgcggcggatcagatatcggccatatccaaaggacccggtgcggtccaccatgttcagtaccgaacgtgtggcaagaaaaccggtgataacgaaaaacatcgtcacgccaatgaatccgccctgcaatagcgacgggcgggtgtggaatgctatgactccaagaatcgccagagcgcgcagtccatcgatacccctgaaatgggcaggcacagacgatcgagatggtgcaggtttcaaggttatgctcacagtattctaagtgtactctcaggaatcgttaggtatactgcccggattacgcatatctcaggtagtgacctatgccgttatgacttatgacttccggcaacccgcaccgaaaccgccggaatagtgacataatcagaaccatgattcttcatctgcatctggtccgtcacggacagacctatttcaaccgatacaaccgtctgcagggatggtcgaattcgccgctgaccgagtcgggcgtcgccgatgccgtcaaggccggtgagcgactgaaaggattgacgttcgccgccgcctactgttcggacaccacgcgtgcccagcagacggccgagaaaattctcgacatcaacgaagccgcgggtaacccgcgctccgcactcgtgacggacatgcacttccgcgagcagttctacggctactacgagggacttgacatggccatggcctggtacgccgcgggagcgccccacggcgtcaaaacctacaaccaaatcgtcgagaagttcgggttgggggcctcgcgtgattttctcaaggaagccgatcccttccacgacgcggaatccgatgaggaatattggacgcgcgtcgaaggtgcgttccgtcttatcgccgacaacccgaatctcaaggacggcgacgatgtgctgcagatttcgcatggcaacacactgcttagcctcggtcaccggttcggcggccctgacctcgatctgaacgaacgcccggccaatggttcggtaaccgtgatcgacttcgacaccgacaagccgttcggcgaagccgtgaccatcgtttcgtacggcaagtagcaaatagcaagcaatacatatcgaatagcacgtacggtccacggcggcacgccgcaaacgaaagcgtcagcaggacagcctttcgcctatagccgcatacgcccacgcgcacggttttcgccctgcgcatgcaatggtatgccaagaaatagggaaggagtgctacccttaggcgagtaagtgtgaccgcaaggaggaaacaatgggagtcggagagatcgctggcctgatcgcggccatcgcgttcgcagtattggccggtttcatgatctatccgctgatcaggctgggcaagatgtttgatcagatatcgcagacggtccgggagtccggtgaacacgccatccccgcgctggacgaaggcgtgaccaccgtcaagcaggtcaacaagtcgctcgaagacgtgaacaagatttccgccgcggcttccaccaccgccaacaacgttggtgcgttgaccgatctgtatggctccttcctcggtaagcccatcatcaagatcgcttccaccttctacgcgctgaaaaccacgggtcagtccttccttgcgaagaacgccgcgaaaaccaccgtcaacgacaccgccgagaagggggagtgatgttcaaacgcatcttctgggtcggcgtcggcgtggccatcggaatcgttgccgtcaccaaggcacaggcctatgtcaaggccaatacgcctgatgcggcacgccagttcctgcttggccccgatcaggacaatgtgccgatgaaaacactcgaagggttggtcaacgagttcaatgccacccgtcgagcccgcgaggctgagctcaaccgtcagtacatcgagcgcgccaactgacacgcgcatgccgccttgccatctagtcactgaatcagctagaacaaactaatcctcataatccagtcttttccaccaataccaggcgcaactgcgcccattacccaaacaaggagttcatccgctcatgcgcactgcggacatcgcaaagcgatacctcgattattttgccaagcacgaccatctcatcgtgccctcggcatccctgatttccccgaaccccaccacgcttttcaccatcgccggcatggtgccgttcatcccgtacctgatgggtgagcagaccccgccgaagcgccgcatggcctccaaccagaagtgcgtgcgtacgctcgacatcgacgaggtcggcaagaccacccgccacggcaccttcttccagatgctcggcaacttctccttcggcgactacttcaaggaagaggccatccactacgcctgggagctgctcaccacctcgcaggatgagggcggctacggcttcgaccccgagaagctgtggatgaccacgttcaccgacgatgacgaagcccgttccatgtggatcaacgagggcgtggaccccgagcacatccagaagatgggcatggaagacaacttttggaccaccggtggccccggacccggcggcccctgctccgaaatctacgtggaccgcggccccgccttcggcaaggaaggcggcccgattgccgacgagaaccgctacatcgagatctgggacctcgtgttcgagaactacgaggtcgacaacgtcaagtccaagaccgacctgcacatcgtgggcgagcttgagaacaagaacatcgataccggtgccggcttggaacgtctggcctacctgctgcagggcaagaacaacatctacgagaccgatgaggtcttcccggtcatcgaggccgctgagcagctctccggcctgaagtacggcgagaacgaggacgccgacgtgcgcttccgcgtggtcgctgaccacgtgcgctccgccctgatgatcatgtccgacggcgtgcgcccgtccaacgtgggccgtggctacgtgctgcgccgcctgctgcgccgcaccgtgcgctccatgcgcatgctcggcgtgaccgatccggtgctgcccaccctcttcccgacctccaaggccgccatggaggccagctacccggagctcaacgacaccttccatgaggtgtccgaatccgcgtatggcgaggaagacgccttccgccgcacccttgagaccggcaccacgattctcgacgtggccgtcaacaaggccaagagcgattccgccgagcccgtcgtggccggcgaggacgccttcaagctgcacgacacctacggcttcccgattgagctgaccctcgagatggccgccgaacagggcgtgaaggtggacgaggccaagttccgcgaactcatggccgagcagaagtcccgcgcccgcgccgacgccctcaagaagcgtcacaacgtggatctttccgtttacgacgacttcaagaagacgctcgtcagcccgatcgacttcctcggctacaccgacatgtccgcccgcgccaaggtgatcggcatcatgcaggaaggcaagggttccgtgcccgccgtgaccggcccggccaacgtcgaggtcatcctcgaccgcaccccgttctacgcggaggccggcggccagctcgccgaccagggcgagatcctgtccgacgacggcgccgtgctcgaagtcgacgatgtgcagaagcccatcaaggacctcatcgtccaccagtgccgtctgaccgaaggcacgctggtcgtcggcgccgaagtcaacgccaacatcgacctggcccgccgtggcgccatcgcccgctcgcacaccgccacgcacatggtgcacaaggcgctgcgtgaggagctgggcccgcaggccacccagcgcggctccgaagacgccccgaaccgtctgcgcttcgacttccagtggtccaaggccccggccaagtccgtgatctccgcagtcgaggagcgcgtcaacgacaagctgcgcgacaacctcgccgtgaccaccaaggaaatgaagttcgacgacgccatcgccctcggtgccatgcacctgttcggcgagaagtacggcgacatcgtacgcgtggtctccatcggcgaagacggctggagccgcgagctgtgtggtggtacccacgtggaccacgttggcaagatcggcatggtcaacatcctgtccgaagcctccatcggctccggcgtgcgtcgtgtcgacgccgtcgtgggccagggtgcctatgacttcaacgctcgtgagcacgcgctggtctcccagctgtccgacaagctcaacgctcgtccggacgagctcgccgagcgtgtgaacgccctgctcgccaagctcaaggaatccgatcgtcgcttggcctccatgtacgagtcccagctggccgcctcggttccggcgctggttgctgacaccaagaactccgcggccccggtcaaggtggccgtcaagaacgtgggccactttggcgcggtcgatgccctgcgcaagaccgtactcgacgtgcgcgcccagctcggtgaagacgcccccgtggtggtggcccttgccggcgtgaacgaggatgacaagccgatggtcgccgtggccaccaacgaggccgcccgcaaggccggcatcaaggccggtgatctggtgcgtggcgcagccaaggtcctcggcggcggtggcggcggcaagccggacttcgcccaaggtggcggtgtcgatgcctccaagatcgacgaggccctcgaagcgctcaagcacgaggcgcagaaagcctgattccgccagtggtgtggttaggcgttgatttgggtaatgcccgggtcggactggcactgtccgacccggagcttacctttgcacatcctgctggcaacattcatgttgccggcgactatttctttgctattgacgaggtcctgaacgtcatcgaagacgaacatgtggaccatgtaatcgtcggactgcccctgcagatggacggtacagaaggcaaaagcgccaaaaaagcgcgcaggtgggcggccaatctggagaagaggctgcaagcagagagtgaagacagtgattctacggagtatcagattccgcaggtatcattgatagatgagagattgacaacagtcagtgcgcatcgtcagctgttcgaggcccataaagcttcgaacaagcacaggccggtggttgaccagcagtcggcagtggtgattttgcagacggcactcgaccgtacccgggagcagtgaggtatcggttatgaccgatgattttaacgagttctttgatgacaacacgcattgggtcgaacaggggtcagaaccaatgcgcggggccgagccgccagaaccgccgaaatcccgcagggagatgcgcaagcgacgtgcacagcgcaggcgcaagcgtatcagtggcattatcatcgctatcgccatcgtcgccctgcttatcggcggcggctatttcggcgtaaccaagctcatcgcatggcgcgacagccggagcaaccagtcgacggccatcgcggactatccgggaccgggctatggcgaggtcgaattcaccgtgagcgagggccaaggcgcggcggagatcgccgataatctgctcaaggccgaagtcatcaagtctactgccgcgttcaccagcgtggtcaacgccaatagcacgacactctatccgggaacgttcacattgaagaagcatatggccgcatccaaagtgatcgacgttctctccgacaccaaccaggcggcgggcttcctcgaggttcgtcccggtgaacgtgccaccgatgtgttcgccaacgccgcgaagctttccggcattgcccaaagcgaattcgacacgattatcaagaacaagggtaaggatattctgcccaatgaagcgggcggtagctttgagggatggctggagccgggaacctacaacgtcaagagcatgaagagcgcttcggaaatcctcaaggccatggtcgataagcgtatcgccaagttggatgaattgggcgtgccggccggcagtgaccgcgaacgggtgatgatcatcgcctctatcgccgaggccgaggtcaacaaagccgattactacggcaaagtgacgcgagtcatcgagaaccgtttggagcagggcatgtcgttgggcatggattccaccgtggcctatggcaataacgtcaagcccgcgcaggtgaccaccgagatgacccaagacgagtccaacccgtacaacacgtacaagatctccggcctgccgcctacgccgatcagcaatcccggcgataacgccattcaagcggcactgcaccccgaaggcggcaattggctgtacttctgcacggtcaatctggacaccggcgaaaccaagttcgccgcaaccgccgatgaacatgaccagaacgtggccgaactacgcaagtggcaagccgaaaaccagtagtcatcccgttagcttccttcgcttggggaagctgatcggacgttggtctcttcattggctccctcgccgaggggagctgtccgcaaaaaagcggactgaggggaacactgcagggaatgtaacgctcaacttaagcccggggctcccgcgaagcggatggaagaaatctaggacaacaccccaacagccaccgccacaatcgcgcccgccaatatcaccggcacatacggcaccttgcccgcatgtgccggtgatgtgcgttgtgggtcgaatcgcgtccacaaggcaatccatgtgatgccggcaacgcccatcgccagccaccagaccaccacaggcaacaggccaaacagtccgacagacaatcccataggtatcaaggcggtcacatcgccgaatcccaatgaccgaggcaccagcaacgccaacgcgaactggatcaggcaacatagcacggtgaacaacagcgcctgcaacagcacgaacaggtcgttcaccaccactccatacgcgaaatcggcggccagctgaagcaacgcgcccgcagccacccacgcgatcggcacccgccgatgacgaacatcctcaatggacagtgcaagcccacatagcagaccgggtagcgtgaacaggtatggcatggcttaacattaacccctagctagacgtacacatagacgtacacacatgaaacgagggaagttatgctgcgttggcagacggcaggggagtctcacggagaagcattggtggccatgattgaagggttgccggccggcgtgcgtattagcacggacgatatcgtctccgcactggcacgccgtcgacttggatatggtcgcggtgcccgcatgaagttcgagcaagacaaggtccgtctgctgaccggtgtacgccacggcctgaccctcggctcgccggtggccatcgaaatcgccaacaccgaatggccgaagtggaccgaggtcatgagcgccgatgcactcgaccatgacctgccgcgcgaaggccgcaatgcgccgctgagccgcccgcgcccgggccacgccgatctgaccggcatgcgcaagtatggttttgacgacgcccgcccggtactggagcgctccagcgcccgtgagaccgcctcccgtgtggctttgggcgaggtggccaagcagttcttggatcaggcgttcggcatccgcaccgtagcccacgtggtggcgctcggtggcgtgcagaccaaccccgacctgcctctgcccacccccgacgatctggaagcgcttgatgcctcgcctgtccgtacgctggacaaagaggccgaagcccgcatcatcgaacgcatcaacgaggccaagaaggcctccgatacgttgggcggcgtgattgaagtgctggcttacggtgtgcctgccggcatcggcacgtatgtggagtccgaccgccgactggacgcggctctggcctccgcgatcatgggcattcaggcgttcaagggtgtggagatcggcgacggcttcctggaagcctcccgccccggttcgcaggcgcacgatgagatcgtggtcaacgccgacggccgcatcgaccgtctgtccaaccgcgcaggcggcattgaaggcggtatgtccaatggccaggtgattcgcgtacgcggtgccatgaagccgattccgtccatccccaaggccctgcgtacggtcgacgtgctgaccggcgaatccgcacaagccatcaaccagcgttccgacagcaccgccgtgcctgcggcatccgtggtggccgaggccatggtgcgtctgactttggcgaagtacgcgctggataagttcggtggagacagtgttgccgaaacacggcgcaaccttgagtcgtatctcgcctcgtggccggagcacatgcgctgaacgaagggcgtatggtttcgtgacgactgccgcggaaccatcagcaactgtactcaccaatcgtcgagaggattcgtagattatgaccgcacgcccccgcgccgtcatcatcggcatgatgggagccggcaaaacacgtgtcggtaaggaagtggcgcatatgttgcgtctgccgttcgccgatgccgatgtggagatcgaacgtgaagtgggcatgaagattccctcctacttcgaggaatacggtgagccggcattccgcgaggtcgaggccgatctcatcaccgatatgcttgaggatttcgacggtatcttttcgctgggcggtggcgctcccatgacgccatccacccagcatgccctcgcctcctacatcgaccatggcggtcgtgtggtctaccttgatgccgatccggcggaagccatggaacgcgcgaaccgtgggggaggccggcccatgctcaatggcaacgccaactcccgttggaaaaaactgttcaagcagcgtgacccagtattccgcgaggtcgccaacgttcatgtccatacccgggggcttacgcctcagggcgcagcgaagaaagtgattgatatggtatctgagcgagcagtgcatgttaccggagcggcaattgagccgtatgatgtggtcattggcgaaggtgccatgaaccatctggtcgacgtgctgggacccaaacccgccaaaatcgcgcttatccacactcagccggtgcagcgacactccgatcgtgcccgcgccctgttgcgtcagggcggctatgaggtttccgacatcgtgattccggatgccgaacccggcaagaccattaccgtggccaacggcatttgggaacgccttggcaacgaaggtttcacccgatccgatgccgtggtggggcttggcggcggtgccgcaaccgatttggccggtttcgtggctgccacgtggatgcgcggcgtgcgctatgtaaactgcccgacctcgctgctggccatggtcgatgcctccaccggtggcaaaaccggcatcaacaccccgcagggcaagaacctcgtcggctcgttctacacgcctgccggtgtgctggccgacaccaagacgctggctacgctgcccaatgacatcttcatcgagggtctcggcgaagtcgccaaatccggtttcatccgcgaccccgaaatcctgcatatcctcgaagaccacgcagctgaactgcgcgctttcgacggctctacattcctcggctcgccgctcgaagacgtggttgccgagctcattgagcgcacggtaaaggtcaaggcctaccacgtctcctccgatttgaaggagaagggtctgcgtgaattcctcaactacgggcacacgatgggccatgccatcgaaaagctcgagcatttccgctggaggcatggcaatgcggtggccgtcggtatggtgtatgccgccgagctggcccatctgatcggttacatcgatcaggatctggttgactatcaccgctcgttgcttgcttcgatgggtctgccgacgtcgtggaatggcggctcgttcgacgacgtgctcgcattgatgcatcgcgacaagaaggcccgcggcaatgagctgcgcttcgtggtcctcgacgagattggtcacgtcgtacacctcgacaacccgcccgccgaagccgtggaagaagcattccgtcgtatccagcagtaattgaacggccgtaggccgtgccgttcgccatcccctcagaaaaaagtacttggctcccctctaacggaggtaccccggagtcggatttaccttctacctccctctgatgagggaggtgccccgaaggggcggagggagagaagcacaaacaaaaggagtcccaatgaccaaagtcatcgttgtcaatggccctaacctcggacgtctcggcgtccgccagcccgacgtctacggtcgtcaagacctcgacaccctgcgcaagctctgcaccgaatggggcaaggacctcggcctcgaagtcgaggtgcgccagaccgacgacgaagccgaaatggtgcactggatgcaccaagccgccgacgagaaaaccccggtggtcatgaaccccgccgccttcacgcactattcgtatgctctcgccgacgccgcgcacatggtcattgacgagaacctgccgcttatggaagtccatatttccaacccgtccgcccgcgacgagttccgcaagcgttccgtaatcagccctgtggccaccggcaccatcaccggcatgggtttctacggctacaagctcgcgctcgatgctgtggcgcacttgctgagcgaatagaaccaagccctccagccaatcccgggtagcagccgacgttgcgctgaccaactatttcctactccgtttcttcaaggaacacgaccaccgtttccgccaccgcgtacgtatactgttcggcggctccgaagagatcgcgctcaacgacatcaaatggttcgtcgccaacatcggcgcgccgtaccaggccatcgtcaccgatggtcccttcccggtgaacaatatccaaaaagggctgctcgatgtggatgtcgaactgccggtcgggccgcaattgcccaatggacaaaagactcatatggcaccggcttgggtatcgattgcgagaatgcggaaagcggaccgactaccgccaatggtggtttgattatgccggcgaatgagttcgctgaagcagacaaggtattaggcgcggtatcaggtgagacttctgaagatgccatcgtattgcacttcgacatccgttatgcggtaggccaggcacacgaacaaatcatcgagcgtattcaagcacaagccgaagcggcgggcggccgcattgtcgacatccttaacgatgacccatactacgtgcaggctgacgacccgcgtgtccagttgctcaccgcaacctacaacgacgtgctcggttgcgaggctcgacctgtggctgtcggcgacggcacccacgcccgctttatcccgcgcgcactcaacttcggtcccgaattccatgccgaccatgtgccggcggtcgacggcatcgacctggagaccccgccattcatcgcaccaggtgccggcaacgcgcacggcgccgatgaatgggcctcgctgaaaaacctgaaaacagcgtttgttctatatgcgttaggcctagtgcgtctcgaccaatacctgcaatagctggcggataagacgtttgacgtgattatgaccttgcgtatgctttttggcgagcctactattcgtattgttcaagtacgccatgtcggggccgacgcgtctggcgaacacgccgagtcatacacggatgatagagtgaaattccatggttagaagaacacatggtaattctcaagaacacgtcaccaagcatattttcgtcactggcggcgttgtttcctctctcggcaagggcctgaccgcatcttcgctcggtcgtttgctgcgcagccgcggtatccatgttctgcagcaaaagctcgatccgtacatcaacgtcgacccgggcaccatgaacccgttccagcatggtgaggtctacgtgaccgaagacggtgccgaaaccgatctcgacatcggccactacgagcgtttcctcgacgtcttcctgagccagaaggccaacgtcaccaccggtcagatctatcaggaagtgctgcgcaaggagcgcgccggcgaatacctcggccagtgcgtgcaggttatcccgcacatcaccaacgaaatcaagtctcgtatgcgcgcccaggcttccgatgacgtggatgtgatcatcaccgaaatcggtggtaccgtcggcgacatcgagtcccagcccttccttgaggccgcccgcgaagtgcgccgcgatctcggcccggacaactgcatgttcgtgcacgtttccctggtgccgtacatttccgccgcccacgagctcaagaccaagcccacccagcactccgtgatgatgctgcgccagctcggcatttccccggacgcccttgtgctgcgctccgaccgcccgctcaatcagtccatcaaggacaagatctccctgatgtgcgatgtcgatgccgaaggcgtggtcaactgcgtggatgcgccgagcatctacgatgtgccgaagatcctgttcgaggagggcctcgacgcctatgtggtgcgtgagctcggcctgccgttccatgacgtcgattgggacgaatgggccgacctgctggagcgtgtgcaccaccccaagcacgaggtcaacatcgccatcgtcggcaagtacatcgatctgccggacgcctacctgtctgtcaccgaggccatcaaggccggcggctttgccaactgggccaaggtcaacgtcaagtgggttgcggctgatcgttgcgaaaccaccgaaggtgcggccgccgctctcgacaacgtcgacggcatcgtgatccccggcggcttcggcatccgcggcatcgacggcaagatcggcgctctgaagttcgcccgtgaaaccaagctgcctgccctcggcctgtgcctgggcctgcagtccatggtcatcgaatactcccgccacgtgctgggcattgaagacgcgaactcttccgagttcgagcccgattgcgccaacccggtgatcgccaccatggaagagcagaaggacatcgtggccggcaagggcgacatgggccacaccatgcgtcttggctcctacccggctgagctggaggaaggctcgctggtcgccgaactgtacggcaccacgcatgtcaccgagcgtcaccgccaccgttacgaagtcaacgtggcctacaaggatcgtctgcgcgaaggcggcctgcgcatctccggccagagcccggacggcgagctcaccgagttcgtggaactgccgcaggacgtgcacccgttctatgtggccacccaggctcacccggagttcaagtctcgcccgaccaagccgcacccgctgttcgccggcctggtcaaggccgcgctcgaccatcaggcggcgcgctgacgcactttcgtgccgtgcataatatcgcggcatgatgtgctggctgccgtcatcggcgtagcgcaagacatacggtaaagacgtggtggcgaaatatctaatgatgtttcgccaccacgtctttttttgttgtatgagcagcatgcagcatgatgtattggaaggcgacggtaaaaaattaccgtttctatggtgtgttggtagtatgcagataacgcttagtaggccatcgcagaaagaccgaccatgaccgaacaccttgatgactcgacccagcagtttgcgcctctgtttggcgcgaataatgccgtcagcggcacggtggcagacagcgtggatgctgctgcatcagattccattcagggcgatgagatgaggaagcgccgcatctggccgtgggtggtgattgcttgtctgctggttgccttgggggctgcctgtggcggcggtgtttggttcttccaagatcacgtgctgcctggcacaacgctatggggaaattcagttaccggcaaaaccgagcaggagattgccgacctaatcaacgaccaggtcgacaacaccgcggtacgagcgaaataccaggggcagtcggcgacgttcacgctgaaagatctcggcatcgaagttgatggtgaagcaatcgcatccgatgtcatcaatgcccaacgcggtgacgcatggtggcaacagtatgcgttctggattacgcatgatgtggccccgcaaatcaatcccgagctcgctgatggcagtgtggtagataaggcgctgaacattgatgcacaagaacctgttgacgcgcaagtcgcattgaacgataacaacagtggcttcaacgttattgtgggagaaaatggccagggagccaacgccaccagcattgcgaagcaagccatttccacagtggagtcattgggcagtgtccagccacagaccgttcgggtggaactcgacgtaaccgaaccgacgattaccaatgcaattgccgatgaggcgaaaaccacgctggaaaccctagtgaacaatgccgtggccatcaaggtggcggataaagacatcgccaccgtgaatgcgtccatgctgggttcggccatgcgcatcgacgccaaccagcagtcaaagctgaaagacaatgaagtacgtaatggctacgtggtctttgatgccgacaagctgcagcaatactatgacgagcaaatcaagccgaatctcaaattggaacgtgaagacaagaaggtcgtcgtcaataatgctggcgaagtgctgagcactgaaacagaaggccatgatggcattgtgattgccgatggcgcggatacggaggttggtgctcgcttggctcaggtgctggccacgggaactggctcagtgaatgtggacggcaaggtcgatcccaaacaggaagtcaaggtcactcatcgcgtggtgattgacctgtccgaccgtaagctctatgcctatgagaatgacacggtggtcaagacattgaatgtcgtggtcgcggagggcaacgacaacgtcaccggcgaatgcgttggcatgatgtgtacgccgacaggtgacttcaacgtatggcaaaagttgcccagtcaagatatgagcggcacgctgaatcttgccgatggcacggtggaaacatgggatgtcaaagacgtgggcttcgtcaattacttctcctccggttgcgcaatccaccgtattgccggcggatatgtagcggatgccgtaatgccctccatcgccaacggatctcatggttgcgtgggtatcggatgggatgtggccgaatggttctacaactggtgcaatatgggcacgagcgtgcatatccaagtgtgatatgcaacagtgtgatatgtaacaaatacggcatgcagtggtgcgacacataatgccgcatacgcgatgttcggtgtgcatgggacaagcttgcccggctccaatatcgctgtatcgcattcgtgtaatcaagcccacagccaatatgcgtcagggcggctagtgtttgcacttgggttctgctaggttttcataggattaagtgtgatacaaggaaggcaggatggtgaccgaaaacacagcaccaaacgccgccgctgacgtggagatgagccagtatgtggctgatcgtacccgcgtcaacgaggacaagatcaagaaggatgacgagatcatcagccagttcggcgactacaactatggttggcatgattctgatgccgccggcgaagccgcaaaacgaggcattgatgagaacgtcgtacgcgcgatcagcgccgacaaaggcgagccgcagtggatgctcgacatgcgtctgcgtggattcaaggcgttcctcgaaaagcccatgcccgattggggtgtggatctctccggcttcaacgcagacgacttcaagtactacgtcaagccaatcgacaagcaggcgaaaagctgggacgaactgcctgacgacatccgcaacacctacgatcgtctcggcatcccggaggcggagaagaaccgcctcgtctccggcgtggccgcccagtacgagtcggaggtcatctacaactccatccaggaggacctgaagaagcagggcgtcatcttcgtcgacacggacaccgctgtgcgcgaataccctgaactcgtcaagaagtacttcggcaccgtcgtgcctccggaagacaacaagttcggtgccctcaacaccgcggcatggtccggcggctcgttcgtatacgtgccgaagggcgtgcatgtggacatcccgttgcaggcgtacttccgcatcaacaccccggccatgggtcagttcgagcgcacgctcatcatcgcggacgaaggctcctacgtgcactacgtggaaggctgcaccgccccgatctggtccgaggactcgctgcacgccgccatcgtcgagatcatcgtcgaaaagcacgcccgcgtgcgttacaccaccgtgcagaactggtcgaacaacgtctacaacctcgtcacccagcgtgcctacgtgcgcgagggcggcacgatggaatgggtcgacggcaacatcggttccaaggccaccatgaagtacccggcctgcatcctcgccgaaccgtacgccaaggcatccaccatgtccctcggcttcgccggcaagggccagtaccaggacacgggcgcgaagatgattcacctcgccccgcacaccagctccaccatcgtcgccaagtccatttcccgtggtggtggccgctccgcctaccgcggtctggtcaaaatcgtcaagggcgcgtacggttcgtccaactcgaccgtgtgcgatgccctgctggtcgacgacttctcccgctccgatacctacccgcatgtcgacgttcgcgaagacgacgtttcgatggcccacgaagccaccgtttccaagatttccgaagaccagctcttctacctgatgagccgaggtctcacggaggaagaggcgcgaggcatgatcgtgcgcggcttcgtcgaaccgatcagccgtgagctgccgatggaatacgcgcttgaactcaacagacttgtggaacttcagatggaaggatcggtgggctgattccgatgaccgacaacataacacccgtcaaggaaatcaagattccggtcgccgaccccaacgacccgtacgcgattccggccgccatgccgtcctccgtggaccatgccgtgcgctcgttcaacgcaggcgactacccggagcccagccgcaagcaggacgaatggcgctacacgcctatcgagcgcatcaacgagttcttcaccgtgttcgagccttccggcgaaacgcagatcgaagtctccatgattgacggctcgccgttggccgaaggcgtgaagctcagccagatcaagctcggtgagggcctgtccggcactgtgtccaagcccaacgaccgcgtctccgcagtcgaatgggaatccggccgcaccgcaaccattctggaactgtccggcgagatcgcccagcccgtgctcgtcaaggtgcacggcgcgggggaggacctcgacgctttccatctggtgatcgccgccgccgacaaggctcatgcggacgtcgtcgtggaacacgacggtgacgcacgactggccgaaggcgtggaaatcaccaccggcaaggactcgcacgtctccaccacgttcgttcaggaatgggccaaaaccgccaagcatgtggccaaccaccgcatccacgtcggcgaaggcgcatccctgcgccactccgtcgtgaccttgggcggcgacatcgtccgcatccgcatggatcaggacttcggcggcgaacagggcgacctcaacatgctcggcatctacttcgtggaccccggcgagcacatcgaacaccgcacgatggtggtacacaaccacccggactgcaagtcccgcgtggtctacaagggcgcgcttgacggcaagggcgcgcactccacttgggtgggcaacgcgctcatccagcccaccgcccccggcaccgactcctacgagctcaaccgcaacctggtcctgaccccgggcgccatcgccgattccgagccgaacctcgaaatcgaaaacggcaacatcatcggtgccggtcacgcctcttcggtgggccgcttcgacgacgaggaactgttctacctcgaatcccgcggcatccccgaaaccgacgcccgcaagctcgtggtgcgcggcttcttcggcgaactcgtcgaggagatcggcattcccgccatctccgaacatctgatgaccgtgattgaccgccggctggcccgtggtgaaaacgacgccatggcacaggtcctcgaagacaagtaagaacagcatttttaggagcacaacaatgtcaacactcgaaatcaaggacctgcacgtccacgtcgaaaccaaggaaggcatcaagccgatcctgaagggtgccaccctgaccgtccactccggcgaaacccacgccatcatgggccccaacggttccggcaagtccactctcgcctacacgttggccggccaccccaagtacgtggtcgactccggcgaggccctcctcgacggcaaggacatcctcaagatgactccggacgagcgcgccaaggccggcctgttcctggccatgcagtacccggtcgaaataccgggcgtgtccatgaccaacttcttgcgcaccgccaagaccgaaatcgacggcgaggctcccggtattcgccagtgggccaaggacctgtccgcagccatgaagcgcctcaagatggacccgaagttcgcctcccgttccgtgaacgaaggcttctccggcggtgaaaagaagcgcgccgaagtgctgcagctcgaactgctgaaaccgaagttcgccatccttgacgaaaccgactccggcttggacgtggacgccctgcgcatcgtgtccgaaggcgtgaaccgcgccaaggaagccaaccagttcggcatcctcatggtcacgcactacacccgtatcttgaagtacatcaagccggacatcgtgcacgtgttcgccgacggccacttcgtcaagaccggcggccctgagctggccgacgaactcgaagagaacggctacgaccagtacctgcccgaaggcgccgactccgagtccgcactggcctgagtccgtgaccgtgggagtctgacatgccctattctcgacacgctccgggccgcttaggccaggtctttacggtcgcgaacaggccatgtcagactcccactcgtttcgtacaattgttacgtaagtagggggaacataatggttgattttaaggcgattcgggcgcagttcccgattctggatcaggagattcacgggcacccgctcgtgtacctggattctgcggccacctcgcagaatccgaatgcggtgatcgacgccgaggcgaacttctaccgtacaattaacgccggcgtgcaccgtggtgcgcacgagctggccgcccgtagcaccatggcctttgaggaggcccgagccaaggtggccaagctggtcggcgcgaatgcggccgaaggtgaagaggaggtcgtcgtcaccggtggtgccacggccggactgaacctgctcgccaccgcattcggcaatgcatcgctggggcgtgggggagaagccgccaagcgttttgccctgaagccgggcgatgagatcgtcgtctcgcgtgcggaacatcattcggtgctgctgccgttccaggagctgtcctaccgtaccggcgccaccttcaagtggatcgacctgaccgaggacggccgtgtgcgtacggacaacctcgacgaagtcatcaccgagcgtaccaaggtcgtggccgtcacccacgtgggtaacgccacgggtgccatcaccaacatcgccccgatcatcaagcgtgcgcatgaagtaggttcgatcttcatcttggacgcttgccagtccgtaccgcacctcaaggtcgatttccacgcgcttgatgtggacttcgccgtctggagcgcgcacaagatgtacggtcctaccggcgtcggtttcctgtatggtaagcgcgaactgctcgaagccctgcctccggccaacttcggcggctccatggtcgagctcgcctacatggaccacgaggcccaatacatggcccctccggcccgcttcgaggccggcacccagccggtcgcccaagtggtggccgcaggcgtcgccgccgaatggatgatgaacatcgggctcgagaacatcgaagcccatgagaagaccatcgccgccgaactgctcaagctcggcgacgtcgatggcattcgcatcctcgggccgcgcgaaaacgtggaccgcatcggcaccgtggcgttcgacgtggccggcgtgcatccgcacgatgtgggccagttcatcgacgcccagggcatcgcgattcgcgtgggacaccactgcgcccagccggtacaccgccacttcggcctatacgcatccaaccgtgcctcctccggtgtctacaattcggtcgaagatgcccaagcgttggtcgaagcggccaagggcatccgtaagttctttggagtggagtaaaacagaacaccatgaacgaattcggtatgagcggggatgacctcgaacagatgtaccaagaggtcatcctcgaggcgtcgaaacatccgcatggcaaggaatcctttgcgcccaacgcagcggtcgaacagtccgcggacgcagcggccaatgtcaccgtgcaagccagccacgaatactgcacgcccggtgaatcgcaccagttcaacccgacctgcggcgacgaggcgaccatccatgtcgaagtctccgatgacgaaccgcacaccatcaagcgattggtgtgggacggccacggctgctccatttcgcaggccagcctgtcggtgatggtcgatctggtggacggcaaaaccgttgatgaggccatggatctggaacagacattccacaagctgatggaatcgcgcggtgccggtctggacgacgagaacctggaagaaaagctcggcgacgccgtggtattccaaggcgtgtcgaaataccctatgcgcatcaaatgcgctctgctaggctgggaagggctgaaggactccatcgccaaagccctcgctgcaaagaactgaggaaatatgtccaacgataatttggttcccgaaccacagccgtccgttttcgatgccgtcaacggcgtcctgcaggacgaggaggccgctcgccgcgtgatggccaacccggccttggccaagggcttcccgaacggacgcccgatcgagcactctgctgcgtccggcgatgacacctgtgcgtgtggcggtcaccacggcaaatgcggttgccaggatgacgaacagtccgatggcagcgagattccgatcaaggcgattgacgatatcggccgcgccactgccgaagacgtgcgcgaggcactgcatcaggtgattgatccggagcttggcatcgacgtgatcgatttgggtctggtctacggcattgagatcgatgagctaggccgcgccattattacgatgacgctgaccacgccggcctgcccgctgaccgaccttatcgaggacgaatgcgcatccacgctggccggtctggtcgaggagttccgcatcgactggacgtgggatccgcgctggaccatggagcgcatcacgcccgaaggccgcgaccagctcgccgccctaggcttcagcttcgacaacatgccaaagtactgatagcgcttagtaagttccctcatcagagggagctctatacgagaaaagccccgcatgatgcggggcttttccatgtctggactggtcaatcagtcatcgacgatggtgttcttcgggacaaccgtgatgccatccggcgtgacggtgaagccacgggccagatcgtgctcggtatcgatgccgacagtggagttctcggtgagcaccacgttcttgtcaagaatcgccttgtacacgcgggcgcggcggttgatgactacaccgtcgaacagcacggaatcgacaatctgtgcccacgagtggatacgcacattgggggagagcacggagtggtgcacttcaccgccggagacgatcacaccgggggagacgatcgaatcggtggcgtggcccaaacggtcgcggccggcgtgcacgaacttggccggcggcaggttgccggacatcgtgtaaatcggccaatcctggttgtacaggttgaactcgggcacataggcgatcagatccatgtgcgcatcgtagaactgcttaatcgtaccgacgtcgcgccagtaagcgtgatcagtggccgtggagcccggaatctcgttcgagttgaagtcgtagacgccggcttcgttgcgggaagcgaagtacggggcgatgtcgccgcccatgtcgtgcttggtgtcggcagccttctcatcgagagccagagcctcgaacagggccttggtgttggcgacgtagttacccatggaggccagaatctggttcggattgtccggcagaccggtggtggtggccggcttctcctggaagttcttgatcatgttcgggtgatcgggatcgacctcaatcacaccgaactggttcgattcctcgatgggctggcggataccggccacggtgaactcggcgccggactcgatgtgctgctgtaccatctgttcgaagtccatgcggtagacgtgatcggcacccacgatcaccacgatgtccggctggacatcctcgatgatgttgatggtctggtagatggcgtcggcggagccgagataccaatgcttgccgagacgctgctgcgcgggcacaggggagacgtacgagccaagcagcggggagaaacgccagacctgggagatgtggcggtcaagcgagtgagacttgtattgggtgagcaccacgacctgacggtacccggagttcaccaggttgctcaacgggaaatcgatcagacgatacacaccaccgaagggaacggcgggcttcgcgcgatcacgggttaacggcatcaggcgggtcccctcaccacctgcaagcacaatcgacagaatcttgggattcttggtcatcgtaactgtcctctctgttactgagcgtctttcgacaccgcactgccgggccggatgcttccttgcattcggtttacatagttaataattgcagaaaaaaacgaacatgcaaggctttcgcccccgcgtgccgtgaacttgcgatgaacagtttcgtagatttgttaaggatccggccttttcggagcgcgtgcgattccttagcgtgtcgcgtagaacgccactgcgctggatgccgccacgttcaggctatccacgccgtggctcatcggaatcttcacggtcaaatcggcgcgggcaatcgtatggtgggacaggccgtcgccctcggtaccgaagatcagcgcgagcttgtcgatatgcgtcggatcttcggcaggcgcgtgcagacggcgtgtcagttcgtccaacgaaatcgaacgatcctccaatgccatggccacggtggtgaagcccagcgacttcaactcgtcgatgccctggaacggccagtaatgcttgttttcggtgccgtcgtcgttgaacccggtgatacgggtccacggaatctggaatacggtgcccatcgacacgcgggcggcgcgtcggtacagcggatcaccgcaggagggtgtgaccagcacggcatccacatcgagcgcggccgccgaacgcatcagtgcgcccacattggtgtggtccacgatgttttccattactgccacgcggcgggcgctcctgcagacctcggctacggagggcagcggccagcgtcgcatcgcgcatagggctccgcgatgcaaacggtagccggtcagacgcttgagctgctcaggtgaggccacgtagacgggaatatccgcgccccagcgcccgtcgatgaagtcgaaggtgtctttcatgccctccagccaaggttcctcgaccagcagtgacagcggttcgcggtcagcggccagcgcgcggtcgataaccttgggggactcggcgatgaacacgcccttggctggttccaagcgattacgcaactgcatttcggtgaggctcacatacgcttcgacgcgcgggtcgtcgacggtgtccagcgtgatgaactgcattggtggcctttcgtgtgtgcagataacgaaaaaccccttgcaatgcaaggggtttatctgtgcccgagacgggacttgaacccgtacgcccgtataaaataggcactagcacctcaagctagcgcgtctaccattccgccacccgggcaggtgtcgtttggacaacgagtagatagcttagcatgaaattacagggatgcaattcgcgcgtgtgcccggcgtgtcgcgtgtagccttgaagtcatgactgatgccctttttcttttcgacccgcaggtcgacgacgtcccggtgaacagcgacgaactccacgccggctggaagctaaccctgcccgctcacatcaagcgccatgccgtgcaggccatgcgactcaaggcaggggacagcctgcaactttccgacggcaacggcttgagaatccaggcagtgatggccgatcctgaagccggactggctgaagtcgtggaagtggggcgcgaacccgagccgctcacccgtttggcgctgattcaggcattggcgaaaaccggccatgatgagcaggccatcgatatggctactcaaatcggcgtcgaccaagtggtgccatggcaggcggaccgatccattgccaagtggaaggtcggccgtacagacaagaagtggaattcggtactggatgccgccaccgagcagtcgcggcgcgcctttaagccgcaactggaggcgtgcgcgtccagcaaggaggtcgtggccatctgccgcagggcctgcgtgcatggcgatgtggtgattgtgctgcatcaggatgctaccgatacgtggtccggcgtggaggagaaggttgcgcagttggtggaacgcacgctccaggacggccggccgcggactgtcagtgtggtggtcgggcctgagggtggcatcagtgagcaagaggtagctgatttcgtcaaggccggagcggtgagctgcgtactggggcgcaatattctgagagccgcgacggccggtccggtggcgttgtcgctgttgtctcgggtgttgggacgttacgagtaacgcccacgcgctaagctggtgcgtagcaacatcaaaccaaggagcatgatgagcgaatccgacgattgcctgttctgcaagatcatcgcagggcagattcccagcagcaaggtctacgaggacgagacgacctacgcattcaacgacatcaatcccaaggccaaggtccacgtgctcgtggtgcccaagaagcactacgccaacgtcgccgaacttgccgccgatgacccgaccgagctggcccacatcgtctccatcgcgcagaacatcgccgacaaggaatttcacggcgcctaccgactggtgttcaacaccggtcttgacgccggccagaccgtcttccacgtgcacgcgcacgtgatgaccggcgaaaagctcgacgagtagtaggggaatatccgcttcgtggcaacgactacacgtaccatcaccatcccgccccagcttgaccccgtcgccgtgctcggcccggttgacgaggtcattcgcgaggtggagcgcgcctttccggacctgacgattatcgtgcgcggcaaccgcgtggcgatcgtctcccgctccaagcagaccgaagcccaagccgcacaggccgaggatttggtcaacaccatcatccaagccgcctacaccgcgcctatggacgccgacactgtgcgtcgcatgctcgaccagaacgtgctcaagaaccacgtgcgcctcgaacatcccggtcacggcccggtgcgtgacaaactggcgcaatcgacctcaaacgaacgcgcccatgcacgttctgccggctcccacgacccgacgtaccgcaagcccacggttcccggcgtcatcacctttgctgccggcgtgccggtccgtgcgaaaaccgccggacaagtggcctacgtgaacgccatcgaatcgcacaccatcaccttcggcattggccccgcaggcaccggcaagacgtatctggccgtggccaaggctgtgcgtgccttccaggacaagcagattcgccgcatcatcctcacgcgcccggccgtggaggccggcgaaagcctcggctttctgcccggcacgctgaatgacaaggttgacccgtatctgcgcccgctgtacgacgcgcttggcgacatgctcggcgccgaccagctcaagcggtacatggacgacggctccatcgaagtggcgccgctcgcctacatgcgcggccgtacgctgaacgacgcgttcgtgattctcgacgaggctcagaacaccaccgaacagcagatgaagatgttcctgacccgtctgggcttcaacaccacgatggtcatcaccggcgatatctcgcaggtggacctgaccgtgccgcgctcgggactggccaccatcgaacgcatcctgggcggcatcaacgacatcgcattcgtgcatctcaaaaccgaggacgtggtacgtcaccagctggtcggacagatcgtggccgcctacgaccgtcactccgccatcgccggcgaccaccgcgacatcgaacgcaagggccgccgcaaccataccgacttcgatgcccgccagcaagcgggttcaaccaaccaaagcgagacagacgatgagcgttgacgtcaccaatgaaacccagtgggtcatcgaccccaaggtcttctccgatttgggtatttgggtactcgaccagatgcgcgtgagcacccagtccgacctgaccatcatgttcgtggatcccgatcccatcgccgaactgcacatgcgttggatgaacctcgaaggcccgaccgacgtgatgagcttcccgatggacgagctgcgccccggcgacggcaaaaccgtgatggaaggagtgctcggcgacatcgtcatctgcccgtgggtcgctgcccaacaggctgccgcagccgggcacagcaccatgcaggagatgctattgctcaccatccacggcatcctgcacctgctcggctacgaccacgtgacccccgagcaggagcgccagatgttcggcctgcagcgacagctgctgctcaccttcttcgccctacgccacgatgccaacgtgcaggccacgctgcccgccggcacacccgacgcgctggccctgtacgacgccgcgcacggtgctggccgcgacctcgattccaaataagctcccaaatcaatcacaccaaatccggattattcgataccgttcaaggacattcaaggacaccgaaaaatcattatggagtattccagtaccacgccgatcgccatcaccgtcattcttgtactcgtggcggccctgttcgtctggctctcgctgaccatggccgccgctgaaggcgccgtggcccgcgtaacgcgagccagccttaacaatctcatcctcgaggtgcagaccgactccgaagcaagccagttcctcaagatgaagaagatcgacaagattcatcgcgtgcaacggctcatcgccgaccgttacgccaccgccggcagctgtgcgttcttccgcatcgcctgcaatgtgctcgacggcgtactggtgtcttccatcgcatccctgtggggtgcggaactgtggattgaactgctctccggattcctgttcgcgattatcgtagccgtggtctccgtactggtccgcccgcgcaccgccggcatggccaagccggtcggcatcatgatttccaactcgcgcatcgtgtcgttggccaccaagctcacgccgttcgcacgcatcggtggcgacaagtccggttccaagggaccgggccgccgctccaaggactccgatctgtccgacgacgaggagcttgagaagattcagctcgagcagggcaaggccgccatcgaccgactggtggagtccaacgacttcgatccggaagtctccgaaatgttgcgcaacgtgctcaccctgtctgatacgttgactcgcgagatcatggtgccgcgcaccgatatgatctgcatggagcgcgactccacactgtcttccgcgctgaaactgttctcccgctccggcttctcccgcgtgccggtgatcggtgaggatgtggatgacctgatcggcgtggcctatttgaaggatgccgtgcgtgccaccgccttcaacccggcggccatggagcgcgcggtcgaatccatcgtccggcagccgctgcttgttcccgaatccaagccggtggacgacctgttccatgagatgcagcgttcccgccagcatgtggccgtggtggtcgatgagtacggcggcatcgccggcatggtgactatcgaggatgccatcgaacagatcgtcggcgagctggaagacgagcacgaccgcacccagcgtactgagccggagaaaatcggagacaacaagtggaagatgcccgcccgtacgccgattgccgatctggaggagatcttcgagatcgacattgatgaggacgatgtcgataccgtgtacggcctgctgaccaagattctgggccgagtgccgattgtcggtgcctcggctgtgacgcgcggtctgcgactgaccgccgtggactccgccggacgccgcaagaaggtgtccaccatcgtcgtagaaccggcgcacgtcgagggcggcgaggaaaataacaagacccatgaggaaactgacggcgagcccgtcgaaggcgatgataccgccagcaaggagtgatatgaccgatcagaacaacagcacgaacgacgtcgatgacattgacgttaccgatgcttccgatgttgccggcgttgccgaagtcgacgcgaccggtgaaacggcgaacgtgaccaagcaggacgtgccgtatcgctccggattcgtggccgtggtcggccgcccgaacgtcggcaaatccacgttgatcaacgcgttgatcggcaagcagatcgccatcgcatcctctcgcccggaaaccacccgtaaggcgatccgcggcatcctgaccgccgaccacgcgcagctcgtgctcgtggacacgcccggtattcaccgtccgcgtacgttgctcggccagcgtctgaacgacgtggtcgacgaatctctggccgatgtggacgtggtggccttcctgctgcccgccgatcaggaaatcggccccggcgacaagcgtattctctcccgactgcgtaccgacttcgccaccaagcgtgaggacggtacgttcaagtggcgcatcccgctgattgccatcgtcaccaagatcgacgagcttggccgtcagcaactcatcaacaagctcatcgaaatcaacgatttcgccgatttctcggacatcgtgccggtgagcgctctgaagcacgacaatctggctgaagtgaagaacgtgctcattgagcacacgcccgagggtccgcagatgtacccggacgatcagatcagcgaggagcgtccggaagacaccatcgccgaactcgtgcgcggtgcgttccttgagaccctggacgacgagctgccgcattcgctggccgtggtggttgattccatcgactatccggaagacaacgagaccggtcagggctatgacggcaaggcgcaggtcaacgtgtccatttacgtggagcgtgactcccagaagccgatcatcatcggcaagggcgcctcgaacctcacctacgtcaagaagaagctgcgcaccccggtcaaccgcatcgtcggccaaaaagccaagctcgacctccacgtcaaggtagccaaaggctggcagtccgaccccaagcagctggagcgcctgggcttctaaggcttatagacgaaaaaagctccctcgtcagagggagcttttgctatacggtttacttccgcttcgtgtacatctgggtgttgaggagggtggagtagcgcttgatgaccttgggacgaatcaccttcatggaagcggtcatcaggccgttttcctgagtgaactcctcgggcaggatgatgaacttgcgcacggactcggcgcgggagacgccctcgttggcctgatcgacccacttctgcacttcggcgcgcacggcggcgttcttggcggcatcctccagcggcatgttctcgtccaggcccttggcggccagccacgggcgcagcgactcctcgtccagcgtcaccaatgcggagatgaacgggcgcttatcacccagcaccagcgcctgggagacgaactcgcaacgctgaatgacttcctcgatcgggccgggggagacgttcttaccacctgcagtgataatcagatccttcttacgaccggtgatgtacaggaagccatcgttgtcgatacggcccaagtcgccggtgacataccagccatcttcggtgaacgacagctcagtggcctcgtcgttcttgtgatagcgcgggaacacggcacgacccttgacctgaatttcgccgtcctcggcgatgcgcagggagaatccggggaatgcgatgcccacggaaccagcgtggaacggcgtacccagcgggttgaacgcgcacggtgcggtggtctcggtcagaccatagccctcgtatacaggcacacccgcgccacggaagaaagccagcagttccgggtcaagcggggcaccgccggccacaatccacttggcgcgaccgccgagcacttcgcgcagcgaagagtagacaatcggatcgaaggcggcgcggcgggtgcgggtcagtgcacctgccttgccattggcggagacttccttcatatagttctgcgcagccaccacggcggaggcgaacaccacgccctttggaccgtgtccggccttctgagatgcggcgttgtacaccttctccagcacacgcggcaccacgatcatgatggacggcctggccacctgcaggtcgctgatcagcgtcttgatgccggctgcgatatagatgtgcacgttcgaggccacgacgatgtagttgatggcgcgggcgaaggaatgggcctgcggcaggaacaacaggatggtgtttttcttgtcgtgcagcagttcgggcatgtaggtcggcagattcagcgcggtctggcagtagtgctcatgggtcatttccacgcccttcggcgcggccgtggaaccggaggtgtacacgatggagcacagatcggtcttcttgaccgagtcgatgcgctcgtccagttcttcgtccgagatgccggcgccataggccttgatttcgtccaagccaccggtctcgatggtgatgatgtgctccagggacgggcactcttcgacggccccatccgccttcttacgcatgtccgtgtcctgcacgatcagcagtcgggcatcggagttgttgacgatgttgcgaatctgctcggccgaatcggtgtcgtagacggtggccagcacaccgccgcaggccatgatcgccgcgtcggtcaggtcccagtcgtaggaagtgcggcacatgaatgccacggcatcgcccttcttcaggccgtaatgaatcaggcccttggccacggcacgcacgtcagccaggaactcgttggcggtgacggtcacccaatcgttgccggacttgtaggtgtacagaggctcatcgcccatacgttcggcgcggtccgcatacaggtcgtagatggacgtaccttcgtccagcggcggattgccttcggtggaggtggtgagcaggccggtgacggggtcgatgtcggtgacggtcaggtggccgtcgtcccaatcgtcgctgtgaggcaaagcgatattggcctcgaccggcacgtcggcgttagacaggtaatcgggctcgtccggagtgtcgtcgtggaccgggtggacgaagtcggatcccaacctgagcgccttacgggtgagattgatagtgtgctgcgtgaaggaattgataaccgacaagtcttgctcctgtaaacctttcagtgtcgtccagccatgaggcgaacgcttctcaaagttcaaattgtaatcgtccaaaccgaactcgtcaccttacgcaaccgtaggattctggcgggttaggggagcgcgtggcaaaatattgcacaggttccgatattgttgagtaaccgtgagctacgaaacggcgattgtcgataattattgagcggttggttgctgatcgatgccgggtgattgttggacgacttccgagcaattcatccgcaatgcacatggacacattcgtatttcttactaatttcgggttcgtttctatttcgattggcggaatctcaagtcatggtctttacctttcgactacacttaccatgcggataaccatgtccattttgaagcagaacaagaaagggctctcatggcgcaaaacccagaagccaccgtggtgttcggcgttttgaacgaaacgtccgaaacggaatcccgcgtcgcgctgacgccggatatcgtcacccggctgaagaggagcggtgtctcctcactgattgaagcaggtgccggcattgctgccgactacaccgatgaggattacgaaaaggccggtgcgaaggtgaccagccgtgacgaggtgctcgccgaagccgacgcgctcggttttgtggaccgaccgtccgccgagaccgtggccaagctcaaggccggccagtgggtcattggcatgctcggttccttcaccgatgccgattacgtggccgcgctcgagaaggccggtctggtgggcatcgccatcgaaaagctgccccgtaagctttccagcgcccagtccatggatgagatgacctctcagaactccgtgatgggctacaaggcagccatcaccgccgccgatgcttacggttccttcctgccgatgatgaccaccgccgccggcacgattcgcccggctaaggcgctggtgctcggtgccggcatcgccggcctgcaggccatcggtacgctgaagcgtcttggcgcggtcgtcaccgcgtacgacgtgcgtcccgcctcccagggcgaggtcgagtccctcggcgcgaagttccttgatctgggacttgacttctccaagggccagggcgagggcggttatgcccgcgcgctgagcgccgaagagcaggctcagcagcaggctgccgtcgacgaaaaggccgccggctttgacatcatcatcaccaccgccaaggtcccgggccgcaagcccccggtgctgctcactgcagccggcgtcaagggtctcaagcgtggtgccgtgatcgtggactgcgcagcatccgacctcggcggcaacgtcgagggctccgccgttggtgagcaggtcaccgagggcggtgtcaagctgatcggcgctccctacctggcctccggcgtcgccaccaccgcatccaacctgctttcgcgcaacgtggccgacatcctcgtgcacttcgtgcgtgacggcaagctcggccaggatctcaccgaagaactcgacgacgcgctggtggttgccggccgcgccgccgccccggcagctgctgccgatgccgagaagtccgagaagtaaggaagaaggaataccatgcctactctcgtcgtttccattaccctgttcgtcctcgcgctgctcatcggcatcgaggtcatcggcaaggtgcccgccaccctgcacacgccgcttatgtccggcgcgaactccatccacggcatcgtcatcgtcggcgttgtgatcgtggcagccgaagccaatagcccgctggcctacgtgttcatcttcctggccgctgtgctgggcaccatgaacgtcgttggtggctacgtggtcaccgaccgcatgcttgagatgttcaagtccagcaagaacgagaagaagggggagtcgaagtaatgacctccgcaaccgttggcgccatcgacatcgtcgcttggttcgtctacctgttctctgccgtcctgtttgtggtcggtctgcatttcatgaattcgccgaagaccgcccgcaagggtaaccagatctccgcgttcggcatggtcgtggccgtgctcatggcgttcatcgtgctcttcgccaagggcttcgtgaacattgtcgccgtggtggtgctggtcgtcggcatcctgatcggtgccgtggccggtgtcgtctccgccaagaaggtgaagatgaccgatatgccgcagctggtctccgtgttcaataccgtgggtggtggcgccgccgcactcgtggccctgaacgacatcctgaccaaggaaggcaccccggacatcgtggtgctcatcaccgctggtctcggtattctcatcggttctgtgaccttcaccggctcgctcatcgcagccggcaagctgcagggtatcaagtgggtcaagaagctgaacctgccgggcaagggcgtatggaacattctgttcgccgtactgtccgtcgcctcgctggtcatgctgtgcgtccagcccgaacagcgtctgctgtggtcgattctgaccaccgtgttcgccctgtgctacggcttggtgttcgtgattccaatcggcggcgccgatatgcccgtcgtcatctctgtgctcaacgcctgcaccggtacggctgtggctatgtccggtctggcgattgacaacgttgccctgatcgtggccggcgcactcgtcggttccgccggtgtgaccctgtccatcctcatggctcaggccatgaaccgcccgctgctctccgtcttggccggtggcttcggcggtggtgctgacgccgccgctgctggcgacggtccggaaggcaccatgaaggagaccacgccggacgatctggccgttcagctcgtctacgcgcagaaggtcatcttcgtgcccggcttcggtctggctcaggctcaggcccagcgcgagctcgctgacctcggcgaactgctcaagggccacggcgtggaagtctcctacgccattcacccggtcgcaggccgtatgcctggccacatgaacgtgctgctggccgaggccaacgtgccctacgaggagctcgtggatctcgatgagatcaacccgcagttcccgcaggccaacgtggctctggtcgtcggcgccaacgatgtgaccaacccggctgctcgccgtcccggcaccccggtctccggcatgccgattctcgacgtcgacaagtcccagaacgtcgtggtcatgaagcgcggccgcggtatgggctatgccggtatccagaacgagctctacttcgaagacaacacccagatgctgttcggtgacgcgaagaagagtctgcaggccgttatcgccgcagtcaaggaactgctcgcgtaaccattcttggctcccctctgtgaggggagctgtcgaacggagtgagactgaggggagtggcccatacacgggtgctcccctcagtcagcttcgctggcagctcccctctgtgaggggagccgagctttatatctactacagcccaaacacccgcttaacaaagctgttaacgcgacgccaatagcgctccgggtcggtgctggcgctcatcgtgtggtcggcgccgggaatcagcagtttttcacggtcgatgctggcgcaggcgttgtaattgatgtccagatacttcggattgacaaaagtatccgctccgccatgaatgaacatcatcggaatagtcgcgtgccgtaatgccttcacacaggaggcgtcctcaaaccggtatccagccttgcgtttagacacatgactggccactttgaccagcagcacggccaacgagtgcggcaaacggaacatcgcctcggcattatccgtaaactgcgagaccacggaactgtatccgcaatcggaaatcgcggcgacgacgttgcgggggagtcgcgcatcgccggccgccatcatcaccgtggcggcgcccatcgaattgccatgcaacagaatgcgtgcatccggatcagctgcggtgatcagcgaaacccagcccaacagatcgtcgctttccagcaatcccatacccacgtaacgcccttcgctcaactcatgggcgcgctgcgcgggtagcaggaccgtaaaaccgagttgcgcatagcgatgcgcccatttggccatttccgcgggctctccgatatagccatggcagcagatcgcgtatagatgcggctgtgggtcggaacaatccgggtccaacagccagccgtggagtttcaatccatcatggctgcgcagcgtgaccgattgcttggcctcctcgaaccaccgggcggcctcaagctgctcggacatgtcgaattcgatgcctttcggcgtctcctcgtgcggcatgttgaacatcgaacgtttggctttggtgtccagcgcgaacgtgaacatgacgttggcggccgcggctgtgacgccggctcctgtggcggctatcgcggcaagtgccgcagccatacccctgacaacgcgagtgtgtgtggcgatgacgtcatggccatcctcattgatgacgtcgtccgaacgagtcatatcaacctcccgatacggtactcaccatcgtacgttattttcgaaatcatccccaacttcgtgaaagaccgtacactgagtgtcgctgagcgtacgattttcacgaaatggcggacgatttcgtgaaaaccgtatgatgagaacgggtaagcgtacgttcttcacgaaatggcggacgatttcgcggaaaccgtacgttgagaacgggtaagcgtacgttcttcacaaagttagggattatttcgcggaaaccgtacgttgacgtggctgggacggccgggatgcagtgtcattgaagcatcccgatgtctatttagaagtgcaacacccttgttggtcctgtaattctaacagttcgtcggcgaacgcctcggcgggcgtccggtagccgagcacgcgcatggggcggttgttgatctcgtcgacgatctccctgacctcctttgccatgtccatccggatctcgcagcgtttgggcagataccggcggatcatgccgttgcggttctcgttgcttccccgctgccagctggagtacgggtcggcgaagtacgtggccatgcccagcccgtcgcgcagcctttcgtggtgggcgaactcggtgccgttgtcgtgcgtgacgctgacgcgcgcgccggccggcagcggcgagaacatgtccagctgcgccccgacgctctcgccggcggtcttgtccggaacgacgcgggccatgaggaacctggtcctcctctccacctcggtgtgcaggttgcatcccactccgatgacgctgtcggcctcccaatggccgaacgcgctcctgccgtcggcctccggcgggcgttcggagatgggcactcggccgggaatcgggaagcgcgacgtcctcctgccgccgtgcctgcggcgccgcctgtgccctcgcggcaggcaccgcgcccagcgttcccgaagcggcctgctggagtagacccatcggtagatggtctccgggcacacgcgcatgagcgcatcgtccggccacaggacgcgcagcctgccgctgataagcagcggcgaccagccgcggcccagccattcggccacctgcgcccacaggcggtcgtgcgacagccggtagggctttcgtggcttggatctcctgcggtcggccttgcgctgcgcgggcccggcgatgtagtagcggccggtccatggccccgccttcagtcttttcggccggtacgggcggtacgactcgttctcgttggacgggaaccatgtgttgcgcttgatctcccggctgatgctggacgggctgcggcccagcatcgcgccgatcccgcgtatgctggcgccgttgcctacctcgatctggatgacctggcgttcctcttccgacaggtgcgaatatacttctcccataggtgcgacatcccttcggactggttttctaggcaatttccaatctaacgggtgttgcactttcatttagacaacgggcatcaccacgccaaagtccggagttggcgtatacttgacaattgttgctttggcgagggaagtgtgcgtgctgacacatgacacagcttccgttatcgactcggcgtatttcactccttgtagggtgtctctcggcgtgtcgtggcgtctgagcgagacagtacgaaacgaaactacaaggagtatccattatggctaccaccattaagcttgagggcgaggcccgttccgagttcggcaagggcgttgctcgtcgtctgcgcgttgccaacaagattccggccaccatctacgccggcggcgaagagcccgccttcgtgaccttgccgatgcgcgagaccaccctggccctgcgtcacaccaacgccctgttcaccatcgccttcgacggcaacaccaagatggccgtcgtcaaggacgtgcagaagaacccggtcaagcgcatcatcgagcacgttgacttccttgaggtcaaggccggcgagaagatcgacgtcgaggtgccggtcttcgttgaaggcaccccgaagggcgctgctgtggcattcgtcgacattcaggagctcaaggttcgcgctgacgtcgccaacctgcctgagaagatcgttgtgagcgtcgagggcctaaccgacggcaccaaggtgttcgctaaggacgttgttctgcctgaaggcgttgagctcgacgttgaggacccggaagagtccgtcgtcaccgttgaggtgccggaagatgcttctgagtccaccgccgctccggaagctgctgctccggctgccgacgctgctgctccggctgccgacgccaagtgagtcgatcgcttcgatagcgaacaattcagaacataactgaaacgtggaagcccgcagccgttgagaacggtgcgggcttcttcgtttttcaccatgtgaactctgccacacgagtaacacatgggtgtgcaaaagtatgcaacagagctcgcgccacaagcgcacagcacacaccccatatggtggctttcgggccgccaaagtcaagaagaagtagctagtaatgactgaaaacacgcaccacgatccggcagcgctcgacaagctcgccgaaccgttcaccgtactgccgaacgacaaccccgcatccgatgagaagcgtcagtccctcatcgacaagccggctttcggccaggtgttctccgacaacatgacccacatgacctggaccaagggcgaaggctggtccgaccgccgcgtcgaaccgtatgcaccgctcaagatggatccgggtgcttccgtgctgcactacgcacaggagtgcttcgagggcctcaaggcttaccgtcatgccgacggctccacctggctgttccgcccggatgcgaacgccgagcgtttccagaactccgccaagcgtctgtacctgcctgagctgccgattgacgacttcctcggttccgtggccgcgctggtcaagcgcgacgccaactgggtgccgtcccgccgcgagtacacgctgtacatgcgtccgttcatgttcgcttccgagccgttcctcggcgtgcgcgccccgcaggaggtcgactactgcgtgatcgcctccccgtccggcccgtacttcccgggcggcgtcaagccggtgagcatctgggttgaagacaagtggttccgcaccggccctggcggcactggtttcgccaagtgcggcggcaactacgccgcctccctgctcggcgagtacaagggtgttgagaacgactgcgagcaggtgtgcttcgtggacgccgccaccaagacctacctcgaagagctcggtggcatgaacatgatggccgtgcacaaggatggccacgtggagaccccgtccctgaccggtaacattctgccgggtgtgacccgtcgctctctgattcagctgctgcaggacaagggccacgatgtagtcgagaccatgattgccctcgaccagctgctcgaggacatcaagtccggcgaagtcaccgaggtgttcgcttgcggtaccgccgccatcatcaccccgatcggtcgcttcaagtccgagaagttcgatgtcaccgtcgccgacggcggctccggcaagctcacctgcgaactgcgcgacgagctgctcggcatccagctcggcgaagtcgaggacccgcacaactggatgtggaaggtgtgctgaatcgccttttggctgagtcttgagaccccttgcgaacgacaatgtttgcaaggggtctcgttgtatcttgggtaagatttccggcgtctaggaatgtcgttctccaacattctccaacaaacttgcggattgagttggaaaacgggtatcggcgtggcgaatcgacggtgattcgctcgaaaaaaatcaaaaaatcaaaaatcaggtttttattatatttatatataagagatttagttactttatatatatacacagctgagtgtgtagtatatatccccactgaactgtgaatcaggttacacagtgacgtgtgtatgtgatacacttctgagtgtgtaaaagggaaacccccgccagcgatcaaacaaaacgggggtttctggaacaggcgttccatgtcccagcctacagcgagacatggaggaaaggcatgaagttcgtgggatacaagaacatggacagagtgtatgagaaagtctcccagggtgctttatccaagctcaactcgggtaagcgcgtcacggactccttcgcgctctcactgctcacctacatggcattacgcgcgtgcgggccaaacgaccaagcagtacacaaaggggagaaaccctactggtgctattggggcggttggaatgacgctatggacgatctgggaatgacgttgcccgattatgaaccgacaagcgacccggaactaatcagcgaagaacaataccggcgtaacgcggagggactgccgaagcgacgcaggacggcatggaaccgtatcggcagcgccgccaaattcatgcaacaacggggcatactcaaactgttgaagccggcgaacgtgttccagcagaagaacgcgatatggctgctctgtctaggcacgcccacggagaatcttctggccgaaaaacaagcaagagaatatttccatttagaagaggagtagcaatgggataccagaacaagcgtcacgcggccaaactcttccagacggaatcgtttttcatcgactcggcaaacagtctcgaacgagacgttttcgactgcctatgcgatatgacgccagaccctcaaagcaggccaccgtatagggacgttcccgatacggtcaacggccccggctcatgtcatgacatcgtgcctgttcctccccgctgctatctcggttacgcgacatgggtgacggagaaaatgggattgcccgaaagcgaagcggagcatgtacgcaaggcattgaaaacactggttgaagccggttggctgtatgcgttcaaaccgagtgtatggcgtatgcctacgatgtggcagctcgtattcaatgaccggtacgagccggatattaaagaagcattgaaggtgtgggagaccggcgacaagtgggactggcatgtctgcaattgtgattggttcaatcagaatatgtttcacctgcattatttcgaccggggtcgaaagctgtatgggagtgtgcgcgaggccgctcatgccgtcacctatcggggatgggtcaaatatctcaagtgaggttgaagcctatgcgaggggatgcttggggacatgaggaacggtaaaatattatcgccttttgaatggcaatagcaatatggcccggcttcctatcctcccatgaacgggatggcacgcgcaccagcgggtgactgttcggaaaccgggccataaatgacatttgcagtatacgcgaaaaccgcccctccgtccagcattactgccgggggaggggcggtggtttattcgcggcgactacttaccggccatacgtaccggattataggcgactccgaatcctgcggcgatgatgcctgcggcggaagcgatgaaaccgccgatttcgggggagccgaagctcatgaacccgagtccgatgaccgaggcgacgagcgtgaccacgtagatgacggtgcgcaccgtgtcattgaatacgggagtgtacggcgtggccgtgtggtcgggaatgttgttcgtgccggtttccgtggtttcttcgagttgggtgtccaacgtgttgtcggtcatgttttactccaatcaaaaaatggtggtgatgccgccatcgggagtaatggcggcatcggttggttttagcggcaggtcaccacgtcaccggggtagtagacgttgatgttgccggaggggaccgaacactgggagacgctgtacccgtgcgcggtggcgaaatcccataccgtgtcgccgtactggagggtcttggagactccgtgggacggcgcgggggtggcagtggtgccgccgtaggttacgacgtcgcccacgtagtagcggttgatgtcacccgagggcgtatgccatgcggacaacggccaagcattgtttgctacggcgagtccccagatggtctcgccccaccgcatgacgtggctgatgccattcgtgttggcggggggagtgctcggctgcacgggcgcggccggggccggggctgtggagccggtggggttggcgtacaagtcccactgccatgcctcgccacggaacacgttgaggtcgatgggactccacgtgttcacaacgccagtacccgagtactggcgcatggcctcgccgtaagcgcccagcatccacgggttggcctgatagccggtcgggctcatgttggcgtattgtgcaatccataggccgtaccggttgcggatgtcctgcgggattgttcctgcgaccgggccggtgtacagcaacggacgcacaccacccgaaaggcgctcacactcagccatgaagcggcgcacccaatcccaattaccaaacgcggggttatcgtctagctcccagtcgagcgccacgatgccgtgacgccaatagttgctggtgttccgccagaagaattgggcttccgcctccgggttgccgcccatcgcgtagtgatacaggccgaacttcttgccgctggcttgtgcctgagcgatcatgcggttggcgtccgtgttgacgccggacacgagacagttgttgttgacctgtccggtgccccatgtggtgccgacaatcacgaagtcggcttgcatgttgtaaacgtctacgccgcactgccagttggacatgtccacgccctgcatgtccgcgtgcgcggtggccggaagcagcatcatgcagatggcggcggccagcgccgtgaccttggcgagcagacgcttccaccacggcttgtccttgtttttaaccaatgtttcccctttctctgaggtgaatattgttttgtggcccacggtcgtgggtcaggattatcggggcccactcggggccgtcaatgaaaagccccacacggtatggtgtggggctagaatcagtcgatcttgtacaggcggggcgtgaaggtcgcgtctatcgttttgcctgatgcgaatcggatcatgaacttgtacgttccggctttggggatggtgatttccgtgtcgctctgatatccgcgccacaggtttttacctgtgctgtcctgaatctccgtgtacacgttgtatgagtcgatttggcatttcggggcgaggtatgtgccggcctcaagttcgcgcgtcgtctcgatgttgaatgattgtgagcatgtgcctgcgagcttgtattcgccgttccccagtggggtgagtgtgatgccaaagctggtttgcgcctggtgttcgggccagaggttcgttagtttattgccccccccccctaaggctggtgttgtcgggtttcatccaatcgtgcgcggtgtcgccggattcgagctggattcggaggtcgccgtccttcgcggtgggcgtggtctcagcacacaggatttcgaagcgcaggctgacggtgccggctgggactgtcctggcattacccgtgttaatctgggcacccagttgaccacctttggcgtcaaggcatttgacggagacggtcagaccgtcgagactggtgggcctgctcaatatcacggtgccctgtacggggcatgggaacgtccacgacaagcccgcccactgccgtgtggcggtgccggtgatgtgcagtgagccgtcactgttgacggtggcggtcaaaccgttgccctcggcgggaccataggcgagcaggttacgggatttcaccgtgactggaatccgcttgctgatgttcggactggttttcgagttgatggtgaccgtcgtgttaccgggtttcacgccggttacgggaatacccatgaggggcctccttgaaataatggaagcccctattcatgaggcttccggtttatgcgtatggcttgtacgcgtgtgcttcgctgccggtttccagcattggatacaccgtcgcgtcaacgggtacaccgttgttcgctccgaccttgcactgataggtactgttttccgataccgtgaacgtgacagccaaattgtgaacttgattgtccagcaccttgtattcggtcttgccgcctgtggcaacgactacgaataggatgattccgtcggggaggttcgcggtggacagcgtgtattgtcccgctggcaacggcgtattatccgtactgccacgatcggcacgcccgactgacgaggtgctggtgcctttcacgtggatgccaccgtcggcggcgaccgtaaacgtcacgccatccagcgtaccgtttggtatcttcatccacatgttcttgatcgggggtaacacgtgcactggaatggttttcgagatagtgccggcttggatggttaggctggtgtcacccggggtcaggccggatacggccacccccccccctaaaagtttcgctcataatggcgggttctagtgatcgttgcaacacctgacctaccgcaaggagggtcaggtgaccagaagccaccgaaacgaagaccgtggcggggaacaccgttggacgttcaacggcgtcgaatatccgacgaggaagctgatgtgcgaggcgagacgcgccgagtacgtgcgcctgctggacgaggaaggcatgaacttcacccaggccgcgcacgcggtcggcgtctcgaaacgcaccggcaaggcgtggcgcaacggcaggacgcgcgccacgggaaggaacgagaaacccctggtggactggtatcgttccaccatggacaaacccaagaccctccatccgcgatacctgagccaggaggagcgcatccagatcgcggaccgtctgcgtctgggcgattcgatccgcgccatcgcccgcctgctgggccgcgaccccggcacggtcagccgcgaggtcgagcgcaacaggaatcccgagtccggcggttacgagccttaccgcgcccagcagaaggccgcggaccggctcaaacgccccaaaccgcgcaaggcggccgagggcacgcgactgtgggacgagatcgccgccgggttgcgcaggcattggagcccggagcagatagccaaccggctgaggctggacttcccggataatggggatatgcacgcgagcgtcgagacgatctaccaggccatctacctgcaggccaggggcgaactcaagcaggagctgaaacgcgccatgaggcaggggcgaaccgcccgcagaccccaaggcggccaaggccgcaaaccccgtttccgcgaacccatggccatgatctcggagcgacccccggagatcgaggaccgggcggtcccgggccattgggagggcgatctcatcaccggcagccgcaacaaaagcgccatcggcacgctcgtcgagcgcaccaccaggttcacgatcctgctgcacctgcccgacgggcacgacgccgaacacgtccagcaggccatcatcgacaagatgcagcacctgcccaaactcctgcgcaacagcctgacctgggaccagggagcggaactcgccctgcacaaacggatcggcgcctcgctggacatggccgtctacttctgcgacccgcactccccgtggcagcgcggcaccaacgagaacaccaacgggctcctgcgccagtacttccccaaaggcaccgacctatccgtctacccggaggactacctcgacgcggtcgccgaggaactcaacgaccggccacgcaaaaccctcgggttcatgaaaccaagcgagaagatcatcgaactgctcgacgccgcgtgataacctcaacaaccgacaacgtgaccatggaaggccgctcaaacctcaggtgttgcaaccaccactagaatctgcctaattattccttagtgatggttgcgatagtttggtttccggtgttcgcagtgaattcctgcgatgcttccgtaggcaggatgcgcacgttgaaatgcttggtttcgcccacgcgcagggtgactgcatcgaccggctggccggcatcatccgtgaccttgatggactcgggagcatacgcggaggcgatgctggcggcggcggaagtgaaaccgttgaccgtggccgtgacgagaatcgtgccgccgtgcctccacgtgagcgtgttgcccgaaaccgtggcggtggacgtgtccctgctcgcgaacgtcacgcccttggtggtcagcaggtcgcccacatgcccgtccgcatacgtggccttcgcccccagtttcagggtgccggatacgggcagcgacttgggcagggcattgcccttatcatccgtgatctcgatggagaccaccgtgtccttgtccagcggccatgcgagtttgccgttgaatagggcgttgtacgtgtggccgttcaataatggtttgccgacacgtttgccggcgtaaaaggctggcatggtcaggcctccttcacagcggccttcttggccttggctggcgtggagtccttgccgggttcctccgtggtttcctcggtggtgccggtggaaggcagtacggtggtcgcagcctccgccttgtccttcaccgcctgcaccgtcgaatcgatggtggcgatagccgattcgcccttcgccgcaaccgcgttggcggtgtcggccacggtctgcgaatcgttggcgacggaagccgccgccatactggcgttcgacgcgaggatattcagatcggactgggttgcggtcgcggaatcagccgaagaccgggcgctcagcatggcgctcttcgccaacgcggcgttggtctgagcttcggccgtgatggactccaacgtgctcatggcagcagcggccttggtgacactcgcggtctcgttgaagaacaccaatacgtccgggtattgggcggaaagcgcctccgcctccgactgggtggacgcgtggcgaaccttcaacagttgggagccgttcatgtccttcggcacgaacgttgcggcgtccacctccacgaggtcggcatactcgaccttggtctgggaattgggcacttcgacgtagcgcgtgtacgcctgcggcgaatccgccagttccacgacctgccagacgaaagcgggcgtcgtaggcagcaggtcaaccgtcaactcaccgtcctcggacaagtccgcgtcgaacgaggccgcgatgatgagattcttcgccgcgtcgaaatggcgccgtaccgggcggaatcgcatcacaccggtcacagggtccaagccgcccgtcttcggcttcatgattttgatatggatttgggtcattgttattcctccttaatggattcgattgtgtggatcaggattgtcgtggcgctatcggcgcggattggatgtcattgttgagcgatgtcccgtgcccgttgccgcccaacgagtgataggagtcgtagaggcgttgggagcgtgatttgaggtcctcgtccgccacgccgtcgtgctcgatgaccatttcgcggcgcagggcttccaactggcacagcaggagctcgcgcagcccgttgaccatggctttgccccatcgccacatcaggcccaaaaccgtggccactccgccacagataaaaggcacgagccaatcgacgacgtgagtgagcaaagacatggaaaagctcctttacggtgggtaaaacccacacgttcgtccccgttggataggccaacgggcgtgtgggttttggaggttgaaaatgctgttacgagagttttgggccaaccggttttggccgtattgcacgcggaatctgcgtgaaagcacgcgcgtgggctacgagtccgcgtggcgactgcatgtcatgccggttttcggtggcatggatatgggcgcgataagcgtggagctagtggacaagtggcttgcgaatttcgacactgccggtgcggcacgcaaggcatggagcgtactacgcgcgatactgcgccgggctatccgctggaacctgttggacgtggacatcacgagacgtgacatccaactgccggccaaacctcattacgagccggcgctgttgactattcgccagcagcgattgctgttgcagggcttttacgggcatccgttggaggcgtggctgatctgcgccgtctcatgcgggctccgtaccgaggaagggtatgggctcgaatggggcgacatcgacctgcgctcaggtgtcctgcacgtggagcgtggcctgcaatgggtgggcgggcatgaggccgtcgtgccgccgaaaaccgaactgtcccgccgcacgctcccgctgccgcgcttcgccgtcaaacgactgcgcgaaatcaaaccacgcgagggagtccgactcatcggcaccctcaccccgccacaagccgcacgccaatacgcaagctggtgcaaacggcatgacctgccgcatgtgcccgcacgcaacctgcgccactcatgggcgacgaacactctggcggctggagcggatatcgccatcgtgtcgaaaatgctcggccacagcgatatcaaaaccaccgcgaagtactacctcaaaccggatatcacggctttgcgagacgcgcaacgcctctgggaacgagccctaatagcctgaacgggattccctaacccagcgttctacgacgtggcgagtaccttacagcagcgacagcattttgcttacgcgcatcggtgatatctgtttcatgggtggcaacgtaaaattcaacagtagcaggcagaacaattacacgaaggctcaggagaagctccccgaagggtatcgacccgtcatcgtcaatacgcccgtggccgttttcggtggtgaaacgacattcatctgttacggcgaggccaatggcaccgtcacgatgcttggcaatccgaacagcgcgtacgcgggatgcaccggcgtatggaggaccgccgacccgatgcccgccgcatagcttcgggacactggctcaggcggttgcactgtcttgcagtgaccccacgggtcatagcgcgtatgagacggtcatgccgaacgcgttcgtgccctgcgtgccaccttggttggcgtaggtcatggtgccgttggcgttcacgtcgatggtcttctggttggccccgtcgcgtccgccgtaggagaagttcaagtccatcgggggactccatccttcgggcagggttccgaaattgccggtgttccacgcgccggacgccgacgacttccagtcgatgcgcaacgtgacgagcgagccgcgacggtagcctttgacggtaccgtaagtggagttaatcagcgtcagcacttcggtctgggttagggaaaactattgcctgttccagattgcgatccagcttccgaatatcgcgaccctcccgcaccagcggttgtctttggtgttccacaggcggaagcgtatctggtttacgtcgctggtatcccaacgttgtgcggtgtactcgccggcctggccgaaaccagtgccgaacggcccaatcgtgtaggccgcgtaatcggctttcttcccgtttggggattggacgttgatgtagaatgtgccgtcatcattcgtggtgacggtatggcctccgcacagaatatacggcattcgggttagggaaagctacgcggtaatccaacagccggatataccgacgaatcggccggcatatccggtgccgttcaacaccattttcccctccggcgtgccgtaaaggtagaaactggtcgcgccgccgttgtcggtgccgcgcatgaccgcgcgggaatcgccggacggtctgaaacccttcgggattgtctcgttgacggacacgttgccgacctgattgaaattgcttgtcagcgtgatgtacgcgcaggcggtgacgatacggccgacgcggaccagagtgatatgcctatcggagtacggcatcttgacttggcccgtgacaggggttagggaatcccacacgtcgctcatcggccgcaaaacattaaacaatggcactggtgtgccgatggtgataccgtccaacgggacacgatacagcgccatgtcgtaggtggtgcccccgtccaacgggctggtggtgttcaacgcggggtcggtgggcgtgcccgtggtgggcgtgcccctgaccacgaccagtttcgcgctctcaatcgactgcgagcccttcgcatagcggcagacgatcagatcgttgcgtttctgaccctgcgagccgttcgtgacaatcaaatcctcgggcgtgccctggctgacgtgacggccctgcatgaccagctcgcccgtgccgatggtcaccttgttcgccgaaacgaccgtgattttgaacttgtcgtgcacgtcgagcacgtagtcgtccaggccgaggatgccggcgttcaatcctgcggcctgttcggcggtggcgtgcgcctttcccgcgtgtccggttacgagttcaaccattctgcttgcctccgttctggtaccagctatcgaagccgttgtcgatgtccttcaaccggttggcgtattcctgccagcagttcgtgcagaacaggtagccgtgctccttgccgtccgcgtccagtcggatcgtgttgtaccacgtcttgatatccgggtcggtcgtgtccttgtaccatttgtttctgccgcaccggtcgcattgcatgaccgtcgcattatcgatacgcgccatagcgtgtcctcccttgttactcggcctcgtaatcgacggacaggacgccgttggagaccttgacgattttcttaacgattgacgcagtgacggtgatacccgtgagattatccctcgcagtcaccgtgtcacccacatcgaacacgatgcccgaatcctcatgcacggtgactttcacatcaccctcggactgcaagtcctgaaggttcttcttcgtgttcttcgccaactcgtccgcctcggcagacgaatagtcgtacacttgggcgatctcgtccactcccttgaacgtctgggtttgggtgacgttgcctttcgcgtccgcataccagtggctgacgatacggtccttcaactcgcccttgcccaaaccgatcatgtgattcggtttgcgccacgtgcgcgaagcgtcgaaatccaacaggtcggagtcgatgtcatccccgtagtcgccagccggttccagccatgtttcgacatggcctgaccggtaagcgactttgagtttcaaaccgttcgctttcgccatcgcgcaaacgcccgtgtacacgtccacataccgttcaaaccggtaagacttgatggacacgtcgccggacgggggaacgaccgctttgaacaacggggtgagcgagacacgagacaacaacgcacccagtatggcggaagcgttgcctgacacggtgaggtaatcttgccccgaatccggggcaagaatcttattctccaacatgccatgccacgtgcgcccggaatacgtgagcgtggaatcaccacgctccaaccggtcacgcaacgcatccaccaccccgccgcactcggactcctccaaatagacgaacgcaccctgcggaatgagcctgtccaccgtcaactcgaaatcgttctcgtccttgccccacgcgcaatccaacgaataatcctcgaccatcatcgaatccacatggttcgcgtcagtcaccacaagccctacacccattgcggttcgctcgcctcctcgatgatcgtcagatcaatgccgaaaccattccattgagcggcaagctcgccggacggtatcggctggaaaatgtagcttccaccgttctcaccgcccgtgcgcacacccttggagaacacgttcgacatgtcaccgttctcagtggtcaggatgatgcttttctcaccctccacactggaaatggtcacatagccgcccgagggaatgtccatgtccaactcgtaccggttgccccccaacgtcaactggggtttcgacaccggcccgaaccagaccatctcaaacggcatcggcgcgggcatcggattcaccacggtcgcattctgcacggtcggcatgtagtcatgagggtaatcatgcggataatccaaatccaagccgggctgcaacgcatccgcccacaaccgttgaacgtccagcctgcgccgccacacgccatccatcaacagaaccgtcaaatcgatgtttgcgtccggcgcacgataatgcgattgcggactggactctacgatgacggcacgctgccgccacacgccgcccgactccgacaacgcggtgatcgtacccggtttacgcaaaagcacatccgagtcagcggcttgcatgagcgcatccagttcatccacatcctcgatcgtcatgttgaccgaaacctcacgggccttgcgcaccggagaagacatgccgcgatactccaacgtgtactcccaatgccgggagcgcagcgcgttcgccgcgccccacgacagtttggaatccaagtcgaacacttggccggtcacgcctgacgtgtaggtcagttcgctcatagggctcctctcacatcacggttgaacgccctctgcgaaggccacggactgctgttctccgcgatcacggacggcagtccggccgcgagagcccccacctgtcggttcagttcgtccacacggttgttcaattcacgcacgccggcgttcaagttgccgttcgcctcgaccttgatagtcgggttgacctcgatgttccacgagccgttcgcgacactgacccggcttcccgtggcatacgcttgggagcgtcgccgcgcgttcaacgcgaacgcggacggttgcatggctttctccacgttgccgaccgcgttcaacgtgttcaggaaactcctgccatacaaggcgtcaatcttcttgacggctgcggcacgaagcaccatctcaccattggacagcatcgccggaatcgaatcggaagtggaagtaccgggaccatagatacgaccaccggtggcatgatggccacccccggatatcgtgtcgatgaaagccgtccatgtgcggctagcgattgaccgcagagtggatagcaggtccgacgcgacatccaaagcgttgcccatcgcattcaacgtcgtggaatgataggtgggcaccttgccgatcaggcttcgtgccattccggcaaacgatggcgtattgccgagacccgtaaacagggactgccactgctgaggaatattccgaaccgcattattggcgatgttggaaaacagcgtcgtattgccgaagccagtcaatatagactgccactgctgaggaatgccctcaacggcgttcttcgcgataccggatggaccactggtgccatcaagtccgaacagccacgaccaccattcatgagggacgccgaacacgttcgccttagcggactcggtgccctcgctggtgttatcgacggcgctgacgagaatattattctcagcgagtttttcaccatcggactccctataggaggcgagtttcacctgagcgtcatcatcgttggcgtcgatgttgaagctgacacccttggcggcgggaaccttattcttctccaagtcctttatcttgccggaagcatggtcgatacagtcgagaatccactgtatctgctcgtcggtcaggttcagatagccgagctcgtccctgaccttctgcatgcgctcctcagcgttgccctcacctgagaacagccacttgtaggctttcttggacatgccaagagcaagaagattctccttgacctcgcctgtctcccagcgagcattgcccttcgcgttcaacagcaatgtgaggtccctctcggacaagtcgcctttcatcagctgctcaacaagactgagaacaccatccaacgtggtgaccactccagcttcacgtagccggataacgatttctttctccccatcggtcagaccggatatgccctgcacgagcttatccaccgcatcttgggcgatttccgaatgagcggtaatcgtggtgcccacatcagagggaatcagaccaagcgaatcagcgtacctttcagcagcttcctcactcatgccagcggcctgagcctgctgcacgatggcctcacgcgcctcataaatggagtttgcggccttctgcgtgtactcctccacctgaccgttcttctcaccataggagagaagctgttgggcggacagcaacgcggtagcggccacgtccttcatcgccttgtcggtgcgcttgtaggcggcgttgttggcgtcagccagttcgccgttttccttgaacgcctgaccgttcgccttgaccgtcgtggcgagcgagctgagcttgtcggacagcgcggaggaggaatcggagatctgttcgagggaacgcagatatttcatctgctccttgacggatttctccaagccttccttgtgctgcttcttcaacgcctgcaacagcgtgtcggcggcgatggcggcatcggtctgcttctcgaccatcatgccgtactggtcgctggccttgtatgtctccttgctttgcgcctccaactgtttgacgagcttcttgtagccggcctcgttgccgctgaccgcatcggtcagcgtactggtattgatgcccagacgtttggccgcgtcggctgcggacgtgtagccgccgttgaccttgacgagccattcagtgaccgcgccgccaccgtccttgccgaacaggagcgacgggtcatcccactgtttcgtggtctccgacttgaaatcgttgaacgcgtccgccgcctccttggcgttggacttgatgcccttcatgccgtcgatgaccttgtccatcgcctgcttggatgcttccgccttcgtcgtgtagtcggatatcgcattgccgatgacggcgatgcccgcgctgattcccagaccggcaaccgtcgtccagccgccgaacgcatcccacaggttcttcacgccggtcttcaacgaaccgaacctgccggactgctgttcggcctgctccccggccgaacggatggaggcgatggcctgaccgttcacaccgaccaagccgcccatgtccttggaagtctccttggcagcgttccccggaaggagcagcttcttcgagttagcttccgccgccatgccgagggaattgacctcgctgatggcaccggacagaatacccgcataactgccggaacgcaactggttcatcgccttaatcagggtgcccattttcacggacgcctgttcggcgctcaaacccagttcgctgagcatcttctggtatcgcatcgtggactggatgttctgcaacatgccggtcttcaacgactcgaacgccgtcttgcccgcacgaccgaacgtggcccacaatgtgatgatgcttttcaccggccccggcaacgagtcgaacgcttgggccacgccggtggcacccttggcgatggtgctgataagcgggctcacggtacgcaaagcggacgcgaacgtgccgccgaacgtgcgcgacaactggcccaccatgctcgccaaatcggagaacatggggcccgcgtcacccaccgcgtcaaacacctggctgaacccgtcgcggacaccggaactgaaatcgcggattccaccaccggactgctgcaacacgcgactcaaaccagtgatgccctcgcctacgatctggcccgcgtcaccgaacaccgcgcgagtggtgtccttcaacgagtacgcggcgtcgccaatatccttgaaagcgttgcgcatcttgtcctgcgcgtcctgtgcgccggcgctccaagcctccaaagtctcttggaacttgatggtgtgaacggccttgttggctttctccaaagcctcggaaaaaccttggatgccgttctcggtcttcgccagagtacccaacgtgccctcaaacacgcctatcaggtcgaatacggacgatttcagatagccgccctgttcgatagccttttccatcgccttagtgacctgaccggtgcgttcggcggtatccacccagttcgcccacttctcggccacgtcggaaatgtaggaggccatgcggggcagatactggctggactggtcgcccaagccgaggaacgcgcgggccagtgactgcaagcccgggttcagttcggacaccgcgagacgagtgttctcgaagatacgcggtagttggtcggcttcgttcgactggcgcaccacgtcgataagcccgttgagcaccttgccttcctcgacggcgataccgttcaaacccttggacagtgagggggccacgtcgttggcgagacggtacaggttatccccatactcgttccaagcgttgtcgcccaactccttgttcaggttcgccagtgaggttttggtgacatcgaacttgtccttcaaatcaccgaacacccggtagcccacgtagcctgcggacgccagcccagccaacgcggcgggagcggccaacgcggccttgctcatggccacgaggctggcaccgacaccgcccacggtacggccgagattcaacaggccggcacccaacgcggtgacgccggcaccgagaatcgaccacttgggaaccaccttgtcgagcttgtcgaacaggttcacaagattctggaactggttctgcacgcccttcaaaccggtcgcaccggaggtcatgccggtgaaaatcttgccaaggtcagtgcccttgaaattggcgaaaatgtcaacggtgcgcggacgggtgaagtaggcgagatgggctcgggccaacgcggtctccaagtccacgtccatcttgagctcgtcgttcttgtcctcgaatttcttcagcttctcctcggcgcgacgcatttgcaggtcgaggtcggcttccaactcccagcgacgttcgggattggctttgatcttcgcggcggtctcacgcatcgacgcgatgattcgttcctgatcgacctgccagtccacgggaatgtcgaggcgcgtatgacgcagcttcttcaaccgggcttcgagcttgtcggcgttgttctcccacaccttgacacggacgttgacctcatgctcccggtcgagtttggcgcgcagcttctccgcgtcatacatcagttccgcgtattttttgtcccattgggtcttatccaatgtggctttggcggtgatcggcttgcgggatgcgaagtcgcgcagcttcttcaactggtcgaaggtgttgttgagctccttgccgaggttcttgtcgatgcccatgggcttgaacttctggaacgcggcggaaagcgcgttgatctgggtctcctgctcgtcgaacaggctggtcagttcgcgggcggtcttgcgctgcttgtccatcgtgcggcgcgaatcgttctgtaccgcgttgaggcgtttgacgctggttcccgtgtctccgaacacctcggccaacgccttctggccggccgtgagcttcggcagctgctgaagctgcctgcggttcagcttctcggacttctcctcaaggtcgagaatcttgttcaggccggagaacagccggtcgttctcacggttgaagtcattgagccgcgccttgcgcatgagctcggcgtccgaatacttggagatggcgtcggtcgccttctcccacttcttggtgttggagtcgataagacgctgctgggccgctaccttgttgtcgaaatcagcggagaagagcttgtcctgcgccttcttgttctccgctatctccttgcctactgccttcaggtcggccttcaggcccttgagctgttcgcgcagctcggggatgcgactgttcttgtaccagttcgcggtgtcgatgtccccggcctcgcgcagctccttcatcttcttgatggaccagtcaagggtcttactgacatcggcctgactgcgggtcaactgctcctgacgtttgcgcccgttctcgatggcctccgcgtacatgtcgtaggcggcgtgctcgtccttgatgagcacggtctgcctgcgggatgcggccgtggcctccttgtcgtagcgggcacgttccaaccgcatacgggagagactgtcctgaaggctgtcggccacggatttctgcgacttcttgacgaacgcctccgtctggccgacggtccgcttggtttggttggaaagccggtgaatcttctcattgaacgacgtatcgtccaagtcgaacctgctggtgaccggcttcttctcccactgcttccgctgggcctgcatggccttgtcgatggcacgcaagccggacgggtcgccgtcgatcttcaccacgttggtgagggtcttgccgtcaaggtcgcgcatctgctccttggcgcgtgcgacacccttcgtgttcacatcaacggtgacctcagggtggcgagaatgtagttccgcgttgagaatcttccagaaattatcggtgtccgggcgaatatcgacgccgaccgcgccagcggaatacaaggccatgagaaaacctccgggaggataaacgaaaacccctcgtggaatgcgaggggttttctgttagaaactgttgccgccgaacacggcacccaacatgcccgtgatctgggcgaacgacttgcccgccgtggtgaacgacttcgacgccatcgaatcgggcttgtccaccactccgggcgggttgatgggacggggcttaatcttcttgtcgcccatcatccgggcgagcatcaccctgagaacgtcaagcgtgttcgccatgtcaagcatgagcatctgcgactgcccataagtgacgtaggagagccgtggcgtctccttggaatcggatgccggcaaagggtgatgttccatcatgtacgcgcggtacaggcttccgtcaacgccttccaacccgtccaacagggcgcacagccatacgggttcgtccaccttcatacgggccgggagattcagattgtagaagcgttggaaatcggagcagaccgctactcggctttcgtcaagcgcgtcttggagccgcttgattttcccagtgccaatgcgtagaacgaggtcagggacaccagtagtacgaacaggtcctccaaggtgcggcccttcgtgaactcctcccactgcttctcgtccacggcgatgtcacgatagaacatgtcggcgtactgggcgatctcggccatgagcacgacggcctcgtcctcgtctcgcttctccttggttttcttcttgcccttgtcggcggtctcgtcatcgaagacgcccgtgtcgaacagtctggtctggcgttcgctgacgcgctgccacgtcacacggaactcggcggactgcgccacgttcaattcctgcggcttcaccatgtcgggaagctcctcgaacaggggaaggctcttcaattcatcccaagtctccggggtcttgttctcggtagtctcggtggtttcaatgttttctgccatcatcggctcctatccataaagtgtgaaaatggttcctatccgaaaaaagaggaatatccttgccgcgcggataggtacgcggcaaggaagaatccgggtcaggcggcggcagcgaaatcagccgggctgaggtaggctgcggacgtgaacttcttggccgcgtcacgcggaagcgcgctggaggtcttgatgttcgcctgagcggagaactccacgaacgaatccgtggaaagagcaggcagactggagaacgcgatatccgtgttcggcagcagcaggccagcacgcgagttgatgttcgtgtcagaccagaggatgaacaacgccttgttgataggcgtcttctccagactgaacgccacgccgacatcgggcatgtcgaccgcgttgtagaaggtcttgaacgtgcccttgtcgccctgcaccgaattgaacgtcacagtgccggtggtctggtcgtactgggtgcggaaggcgttcttaagccacgtggaaagcgtggtggcgtcgccgccgtccaacgcgaactcgggcaggttgtcgttcgacatgtggccaaggttcgtccacatgccgtcgcccacgcccacggtcgccgcctcgacggtgaactgcttgagcagtgcggaggtaatggtcgtatcggccttcgccatgaagatcgctcctcggacggcggtcaatacgccgtcatcgtggatgccgatttcgtcagccatatcgttttcctttcaaatatggaaaaccccgcagccgtgcaggcgtgcggggtctgattgtgtgattgatggtttttcagataaggtcagccgcgtggggacgcggcctgtatacgtttcgtggaagtccacgcgacgatgcttttggaactggtcatgtcgccggaagaccgggactcgaaaccggggttgtccactatgcgcccgattttcccgtacatggttcccggctggtacggccatgcggatatgcaacggtgcagccatccgcagatgcgggccacccgttccgggtcacggcccaacaccgtcaaagacagcgtgtactgccatatccaagccttcagattccagtcgggctgctcaggagcgccgcaatggtagagaatcacgtcatgggacaacaggagcgaatccgtggcaggcgtgacctccggttggatgaccggcctgaaatcacggttcttccattcgacggcgtccaggtaggcgcgtgtcatggcgaccgcatccaactgttcccttacggaaaggtcaaatatcgtggggtcagacatatttcgctttcgacatgatgaacaatcccggcatccaagcactcgggcttttgatgccgtacttgtgttccagccaccggttgaagtagccgaactcaagatgcgaggcgatctcggaaccgtcacggcccttgacgctcatgatcacggcggtatgcgtgccatgcgcgtgcgtgctgatgtcgatgcggttggcgacggacgaatgcttcgccttcatgtcagccagcgccttcgccttcgcctcgaccttctccgccacgggacgggtcgcttcggctccgaacagtatcgccatgtcacggttcaacaccctcgcgggcttcagtttcacgtaccccatgtgcggctcccctcgggcgggacaggcggtttcaacccgttgtcctcggtcgcatggccgatgcatctcgcggtgatgttccaatggtgggcggcatccgaggcgtgacgcatctccataggcgggccgtcaacctcgtaacaggcgttatcgaaccagaactgcgtgttgatgtccccatgccattccggcgcgagaacgatcgccagagcatcctcacgcaggccacctgtcgattgcggcgtggtatcctgcgcccagttcttggaaaacgtgctgttcttattgattcgaggctcgaacgagcagtaacagtaggaggcgtccccatccggcacggtgccggaaccgtagacggtttcgaccggtttcatcggctgcaccacgatcatgtcgcggtgcagaaggtcatccgtgatacgaggctccaactcggtatcgtcgtacaggtggcccccgcccagccgctccaaatccacaccgtcgtgcaggtgacccaaatccatgttttcatcggccataagaggtctcacaatccgtagattcggctcaacccgacaccaatggtgcctacagggccgtgtccctccgcgtaaccgtcaagcaactgcttttcgcgtttgctcacatacaggttgggactggcatcataggcgggcggattaggctgggggtcatgctcctcatacgaatagttgccgttcgactcggatttgaaccggtgccatcgcatgacgcgaatcaccatcgaacagaccacgtaggcgaacgtgtcctcgctcaggtcgcccgaattgagacggggctccgcgttgccggattcggtcaacgctatttcggcggcgatacggcaacgtgatttcacccattcgttcggataggcgtcggctagcccaggctggtcaagcagactgacctgcatgtgtttcatccagtcgatgccgtcaacgcttgccatgacggctcctacaggacgttggccttgaacgtgctgacggcatcctgcaatacgggcagcgcggagccgttgacccagatatcgtagttggccggagcctgatgggagagcatggcggcaacaagaccgtcgttgacgctcttgttgatctcatactcggagttctgggcttcggcggtcgggccggaagcggtgaagccaagggtcgggtcgttgaacgagggaagcatgacgaacgtcgcatcgggaatgagcgtggtggtgtccacgtccatcttgaagccgccgtccagttcaaggttctcgtattcgaggtcgagcatacgcacgtcgttcagctgaagctggctggcgagaacgcccagcacctcgtcgcgggacagtcgcgacttggaatgcgccaagtccatgccggacacttcctgacggaactgttcgttgacgcgcaatgcgtcgatgaccttcgacgtggtgaacgcggcgtgcggtgtacggcccttgttcttgcgcatgacctcaatccagccctgaacgtcggaaatcgggtcggaagtagcctgggaccagagagtggtcggagccacgttatgctgcttggtcggacggccgaacgagtagaccacgttcgcgccgttctcgttgatggtgatcttgccgtccatcatcgcggagatggactcaagttcaagggtcacgccggcggtctggcccagatgcgtggtcttggcttcggccttgtcgtggatgaactgcttgtcgttcgcgtgcttggccatatcacgttcggtgatgtggtccatgccggacaggggcagaaggcccgtatgctgttcggcggactgttcgaccatcgaagtgtggccgatctcggcgtccagcgcacgacgctgcatggcgttcgtggagagcgtcggcagattcggcgtccaagagacggtccattcgccgtcattggactggatggggaacatggtggagaacgggagaataccgttcacgtaatcgaagcccgcctgcgcaacctcggtggcttcgctcggcgggaagatttccttgtccaatgccattggatatttcctttcagatatgagaaaacccgccacgaggggcgggtttcaaagaatcggtttagacggggtgtcaggcgatggtgatggcgtgcgacttgttgtcggtgccgacccaagtgccaccggtgatggcaccagaggtgtccttggtcaaggtgatggacttcacgcccacaccagcggaaccggcagcgccagccgaaccggacaatgcggtgacagcatcatcctcgacatcgtagaagcagccgccccacttggcctcgtcggcgggaacgaccggcagcttgctcttgataatgtcgccacggtagcgaaggcccacataggtgtcatcgacctgccagccggaataggtgacgttcacggcgacggcggactccaacaggccggcgatggcggtctgacggccatcggtagccttcgggtcatacgggccgtaagcgcccttgttggtgccgctcgtgatcttggcgagcggaataccggaacggatgtagatggtcgtggctgtcgggctgaccccggtgaggtacttgtctcgcaacgtctcgtcggtcacgttgaataggtcggtagcaagggtcacggagaccacgccgcccgactgttcgccaaaacgccactcgttgttttcctcaacggtggtcaggccggtgccatgcaccatttcaataggaagcgccatgagtatggctcctttcatttggtttgcttgttatggttgcggcggcgggcgttctgacggtccatcgcacgcttgtaggcgtcgccgcgctttggtttcggattgaactcgccttcggggttctcggcctttcggcccacgctgcgaagagcctcggcttccggcacctgaacacggccgttcggctgaacgcccgacggcgaaccgggttggatgggattgagctccgcataggacttggcgaagtccgcgatatcctccggcgtgccatcacccttgtacagggcttcaaacaccttgtcagtgacctgcggatacgtgctcttcgcaatcagacgcgcgttgtcggcacgcacctgggcaagctcggcctgaacctgctgcacctgcttgaggttcgcttcggcctgcttctcgttcttacggctcatcgccttccacttggcaagctcgttgtcaccggggttttcctccggcttgacgttttcattgttttcctgaatgtcggcggtcgtttctgccgcgcccgtttcaggctgagactgctgaaccgtttcggtttcggcagtgttctgttcttccttggtaggcatccgcccgcccctttcattcacgcggccaaaccgagggtcgaccgcaggtatcggagccacgccctctgataggacatggcttgtcttaaatgcaccgaaggccggaagctgtactttcgaccctcgaatggaaaatcgtcttcctcgcccgtatccagcactttctgataatgctgctggaactccatagccctcgcgtacatgcgctgcaacgcggtgcgcgtcatcttcaggtcggggatatgccattccggcgcgggagtgccgtcatcgtattcacgccgccactgggactgcgtgagaatcggcccgatctcgctatgcgattccacgatgacgcgcacgcttttcaggtcggcggctgacgtgctgccagccttcctgtagatggcgtccaaatcctcccggttgagtttcagaccggggtcattgttcgcggtgatcggggcgacggtgcatttgcagttgttgtgcatgggcaaaaggtcggccgtggaaaacacgttcgtggccgcgacggcgcacaggccgcacgtgccggtcttggaaagctcggggtgtatgaccctacggtattttctgacgccggaaccatgaaaccgttgcgtggccgcactgttcatggctatctgaccatcggtgttcgcattgtccgtcaaccgtttcacggcggcgtcaagccaatcatcaacggccttctgcacgtaatcgtccagattgtcccatgccagcgggcgtatcgacgggtcccttacggccatgctccgataggcgtcggcaggacgcacgctcaccgcccaagggtcggtgttgtcccttgtgacgatgtattcgggaatctgaccatccgaaggcacgttcaccatgccgagcatcacgtccgcataggagacgcccagatgccgcatggctttgatgaacgcgatctggttctgtgttatccacgcggacacgccctgtgttatcgcgtcgttccaccagtcggcggggtcgagcgacttccacatgttccacgcacgctgcacgtaggcgtcgaccagcgcctgacgctgccgttccatgacggtcagcgcctgtgtcatgtcgaccatcacgtcacctcattggtggagtccaacgtctcgtcgcccagaacgtcgttcaggtcaaggatggtcgatgtcgaatccaacgtgtcctgcaaggtgggagccgactgctgtgaggtcttgccttcgaccagagtgttctcctgactcagagcggtggcgaaagccgtgtcctgcaagtcctgcatggcttcggctatatccatctcgctcatgttcaggaaccgtcgcatgatggtcttgaccggcagcaatcccttcacatagttggcggcttgcgcctgctccaaatcggtgggagtctcgaccggctgccacatcgtctcgaaacgttcatcggcggcggactgctggccgcttgcgaccaacgccatgcgaagcaacagcacgaacgcatcattggcacgctcgttcatgtcctgcaccttgagcctcaacatgcgggtggtgagcttcgcccccgccgcgctgccggaaacgtcagggctgagaatcgacaacggggtgccggacgcgccggccaactgtttgatgtccgtgttcgcggcggagacaatcggcgtgatatccgtcacggagctttcacccatcttcgcgtccttcggcatcagccacaaggcggcggggccaagctcgaacaaggacgagtagtcgatcttttcgccggcacgcgcacgattggccttcacggccgggtcctgcttcgtgtaatactcgggaaggtcgccggacacccaacgctgtttgaacgcctgcatctcctgaatgcagaaacgttggaaacgctgctggtcgatggcgctcaacgtcggaagatgaggctcgaactggcctcgaccggtcgcggtcttcaactggacgatgggcaggcaaccgcagtcacgggcgaaatcaagaccatcggaactggccgcgcccacccattcgaacaaggcgggcaacgacggtttcttcttggaatcatcgttcgccagctcatacacggcatcctcatagtcgggactgtcggtcggcagcgtccgcgactccacctcacgtctggcgacacgaccatacacgtcggtcacattgcccttatcgtcacgaaccagacggtacaaggcgatgttctcggtgccttcatccgcgtcatacgagtagacgatggccgcgctcttatcgtcggaaacgacggtatcccaaggactgagcctcgaaatgtaggccgggttaggcgtcgaccacgcctgcgcataggcggcaccgtaaaccgacgcgtcacgcagcatgttcaacgatttcaggttcatgcccgacttctgccacatatcgtcagcggcggtggaacgtatcgccttgtccgacaccagacggaagccggtgggcttctccgaggtgatgaccgcgttcgctatcgtgctcgccaagttcatcgggcagatgtccacgaacctgcggtagatgtccgaactggtcacatccatgttgcgggggaccgccttcgtgggcacggtctccttgccgtcgtagaacgttttcaaccggcacagcatggggatacggttcaccagccggttcgccaagcgggtgagcaccacgccgtcgcctcccggttcgacatcatcgggaaccaacgactccaactgcacggccatatctcaccatccttctaataagtcactcgggtaacgtgggtgcgcaccctcggcgcacgggaactggcctgttccagataacgggtacgcgccgtatatgcgaggacgcccgcgatgcaggcgtctatcttcaacggactgttcggcgtctccttgtacacgaggtactgagtggagccgtcggcgttcgtctggcgcaggttcttccttcgcgcgtttctgaaatgcgcgagaagcctcgggtcggccaacaacgcgacatcaccgatgacgggattgtcctcgtcatcgcacgccgtccattcacggcagaacgcggtatgcatgtccacatacgcctgcttcatgtccgacccccaattgttcgtgtggaacatgatcgggtcgccgttgttgcgctggcccacaaggtcgagatacgagtagtcggtttcccagccgataatgaggtcacgccatccgtggacatccgcgaagaagccgacaacgttatagttgtccagcatccagcgaaccttgcggtcgaacgcctccacatcgacctgccagtcagcggcctcggggccttcgggcttctgttccagtttgataaggaacaacaggccgtccctgacacgacagccgaccaaggcggtcgcatcatcggaaagcgaaccgtcgaagccaagcgttatctcgtcctcgtccgaaatgatgtccttccaaggcgctgcctcgtccaagtcggtgccctcgggaacgcccgcatacaatgcgatgcccgcgagatggcttttcagcagggattcggacagccaagcgtcggaaacgctcgtgagactgttcaggtagtagcgaatcgaatcgcccacatcggaagccgggtcgagaatatccgcgatagggccgcgaatatcaacccagccgtccttcgacgggcccggctccactccgggggagcgaagcgaatacccgtcatcgctcacaccctcgtcgttgaccggcacgatattgccgtcagcgagaatgatatggtccttgccgtcccttgacttcgcggcggaaccatacgcctcatacaggccatgcttcagtttgcccgcatcacccaggtcctcgatgttcaaaggcgaatacctgtggtcgaacagcagcttcgggtccttgatgcgaccctctcgaatatcctgagcgtgcttgtaagtctcctcggcgatactgttctcgccgggacggtacatggtcgtggtttccaacacccacggttcggcgtcgcccatacgcttcgagagattacgtttcagcgtatgatacgtggccttcaaccggggaacgttgtacaagtgggattcgtcagcgatgatgaacgtctgcttgccgccgtcatgcgtggaagaaccggtggcaccgggcttgatcgaaccaccctccggcagcaggatacgggtttcaccgacatcaagcccataaccgcgcaactggctcaaaggcccgttctcgcagttgtacttcatcacctgataaacgttatccgtctgctcctcggcggtggcgatgcacaccacgttcggaccctgcacgggacggcccataggctcgcccggcagatactcgtaagtctgaccgaggaacgtgtaggtttccccgcccttcgcccaaccggcgaaacggcatgggcccaaagcctcgaacaaacccagacggccacccttgccggacttgtcacaacccttggggcgactcaggaacacatggttgaaacgacgctgcccatacttgtcgagcgcgtaacagtccacgtagaaccgcgcatactcaggactctcatacacgggcatgtcatacgcgggctccgaacccacgacgcagaacgactgtatccaccacaaggcaagccagccaagcgaacgctccctatcctcggcggtcagattagggataacgtcatgcatcagcccaccgcccgacgctgcctacgtgcttcctccatgctgatgacgttcgaggaacccgaatacgaggacgccttcaaatcattcgcctgaggcgcgtcgaacttcaaatcgttacgcgccttcggagtgacgccgatcatggtctcacgctgacgaatctcagccgccagaatcgcacgccccttacgggaacgcttgaaatcatccttgagcagcgccgtatccaacacgaaatcccagtcagggccgacgcccatacgctgagccaacgggctacgacgcaaatcctcataccagcggcgagtgaccggcaaccattcatcgcccgtatccgggcgaacatcaggcagttccggcccaacaggctcctcgggactgctcagcaaaggcatcgcggctatcttggacgccctacgcccgtttcctgccatgattcacgctccgtttccgcccattccgggctgtccgacgcacaggcttttcgcccctgcaccggtcgtgaacgagaatgcggttctccaaagtcgctgaatgcgacttctccaaaggaaccttccactcaaaagccgcgccgtcaggcccggcactatctacatcgaccagtccgccgcacttctggcaacggccggcacacttctcaatcacctgcgaacgggtgaaagactcaataaccatccgaggccgttcagccggttccaccgtccgctcatgcaacacggtttcaggacgcgacggcagctcaggatgcagttgacgtttacggaaatacctcaaacgacacttgtccgaacagaacaaacgagaggaacgctcagggtcgaaccatttgaagcacaccggacacatgcgggtacgcagcctcctcaacggagtaccggaataatagttccggttgtaatgctccctacacaaccctttggcgcacaccgggttaagacacccgaacacagcgcaacgctctatcgaaaagccggcctcgaataccattcggcctcctcgcggctcctacgcttctccacccgagcctcaccactctcacgagcggttttctgcttatggtgatacgggcacaacgcccacagattcgacggggaatcatcatcaggctcaccgttcttcgcgcgaaccttatgatcaacctcattggccggatagccgcaaatatgcttcgcccctgtatgccagtcggtcacaatccactggcatcgataatggtcccgctccaatatccgcttgcgggtccgctcccatccggggttgaaccgtgcatcacggttggaagatgaccaagccacgatgactccttgcatgtaggggggcggagccggtgggagcgtggcgagcgagcattccaacggggttaatccaaatacaggggaggttggtccacgagccaccggctcctagaggcaatcccgagaatcgaactcgaacctgcgctttacgagagcgccgctcttccaatgagctagaatgccatgcctcccactaggggagcgctgttcagttatcgccgcacggcatggcatgaagccgccgccgacatccggcgatgacccaagaagccgtcaccgcctgtaatcgcctcttcttgaaggcgttgtggtaccggagtggactcgaaccaccgaccctatgaccgtagccatacgctctagccgctgagctaccggcatcgcatacccggtgagaatcgaactcacgtctgcggttttggagaccgccaccctaccattgagctacgggcatatcggtgataccaggatttttacggtggtgcatcaccatgttcccacctcgcggagagagtgggagtcgaacccacacgcgcttgcacgcagactgttttcgaaacagttgccgccgccaatcggctggcctctccaagtctcgcaacgcattgcacgatcagtatgcaacgatctccgggcgctacccgacattctctgcaaccaaagccgcctaggcgcttagccccagttctctgccagattcttgaactacattgcgattgtggtgccggggagaatcgaactcccatcgccaaaggcagcggtgttacagaccgcgcgcactccacgtgctcgacaccgtggaagccatcccagactcccgctcccagtgaggaaggggcactcctcagccgacatcaacccacgcgaagcggggagccagcacacgatgccgtgcggagattcctgcacgacgccggttcacgggcggtcaaaccccaaccgacagtcacggccttgaccggccttactgaccatcctgcggatgatgcaagatttgcacttgcgaaccttttacggtttacggcctagcaagccgccgcattcgtctactctgccaatcatccacggccacgcccccggtccaagaaaacaacaccaatacaaaacggaatcccagagaactcgaccttacaaatcctcgtaaaactgttttgacggtttggttttcaaaaaaggcgtggcctagtcgtgagagagggaatcgaacccacaacgcaccgggtttgagccggcgtcctctaccaattgggatatctcacgcatacaagaaaaccctgcgactgcggggcctcgtcttgtcgggaacccgagcttcgctccattccccgacaatccgtctatacgacattttactcacaacaagcgttgcagcaagcgttgcaagagtatttcccgcaccaatgaaacgctaattcaaaaaaatggcccagcagatcattcacgggcagaaccattgtccgtgcggcccccacgtcttaccggggtggggctctcccacccccatgtgtgcgcgtgcgcgtgtacgcgcgtgtgggcgtgcgcgtatgcgtgcgtacatgcgtgcgtgtgggcgtgtgtgtgtgggcgtgtgtgtgcgtgtgcgcatacgtgtgcgtgcgcgtatccgcgcgtgtacgcgcgtaggcgtgtgcgtatgggcgcgtgcgcatacatgcgtggttatgggactgtgagcggcggcggcatgaggttgagtgatgttggctcatgtttggtgattgttgcatggtgcaactgttgtatgtgcaactatatgggtatgggagtagtggcgtgggctctgtggtttgacggtttttgtggtggttatggtggtttcgacacgccgataaatgtcaatgttttcaacggtttatgtggtggtgtgattgtacaatttgacatccccttatggggttgcttatgatggagccacaacgaaacgagaacacagaaaggaaccccgagatgaacaccacggagattaaagccaaagcatttagggcggcggtggacctagccacggtatgtaagccctgcacctatgacaacgtgcttgacctcacggccatgtccctcggtatcgagatggacgacaacgaggaataccccgccgagctataccgcaagtttgacaacgtgtggaatgacctcaacaagtaatcagcgcggccatagtggctaacgctagggtgcaagtccctagtcgcgcacttagtcccctctatccaaacctcatagtgagcggcgggcaatcaggcggacatgaaccattgataactaaaaagtgttgccaaaagtcggttgtaatctgcgtagtgagagtacgtcaaacaaggttgcataaatgagttgcgtctaccggcgtctagcctaccgggctagtgaggataagagagcgggtatccggcatggaattgtccccgctatgaacgtcgccactggatagagtggcagacgcggggagataaccgcgcgacggctaaaccggacgtttgaaattgtataattgggcccactgaaccagagtgaggtgggccatgagtcttagggaattaaggcagaagcgaggatatacccaagaacagctaggtaacaaggtaggcatgacgcaaggtcgtattgccgactttgaagccggtcgtagatccatcgggaatatgacacttgataatgcgctgcggatttgtgacgctttgcgcgtcagtaaccctcgcaaactgttagaggctgagaggccaaaagaaaacactagtgaaagctaggtgtgtgccctaatcaattcttcgcctgactgtgggccttgtacacagtcggcctagctcactgggtttaccccatagtctaggcactcatagcgtgccccaaggtggacgggatacgctggaacctgttatatcgaaaggtggtgagccgtgccggttggcgatatcgtcgttgacccgcgtatccagactcgacatcccgacgtgtccgctgattcggtgcgcgtggcatggtcgaacgtcgtgcggtttatggcgcgtgaggataccgacccgttgcgttatgtggcggttggatacgacgagtacgggcgtttgctggaaatggtggcggtactagatgagtcggatcgttggcatgtgttccatgccatgcgtgcgacgccgaaggtgctgcgggaactgaaacttttgtaaaggaggaagtgtcatgtcttttgttgcgaagggtggccgtgtggtcactgatgacatgttggacaagtgggccgacgatgcggataacggcgagttcggcggaaggccgggtgcggtgtattccgggcctgtcgttcctgtcgctcaggcggatgctgtcagtcggacgttttcgttaagcgctgacatgtcggccatgttggatgccgtcgctaaacgtcgtggcgtgtccgctgatgacatcatgcggcacgcgctggtgcgtgagttcgcgtcagtgtgagctgttcggcgtgctggttttccgacacgccgatttgtttaaccacagatagtacgatatagtactaattatcaagctcaatcgagcaagacaatcgcaagtttgaaaactcaagagtgtttccctagccgtagatagcacaatatagtgctagaatcggactcactcataaccgtttgaaagtgggtgagcctatgggattaagggaactgcggaaaaaacgagggctgacgcaaacacagttagccaagcagacaggcatagcgcagacaatcataagccgttacgaacgcggcgagtacgacgttcgcaacatgactcttgacaatgcgctgagactgtcccgcgctcttgggtgccacccctacgaacttacggacgggtggcccgagtaaaagaatgcgctctatggcggcaaccacagagcgcgtgccttaatcgttttcaaacatttgcaagtaatcaaacacaatcgaggcgttgctattctagcacgcctcacaagaaagtgaggaaccatgcgtaaaattctggcggcttcagccgcgttaatcacacttttcaccctgtccgcttgcggtagtgataccgcgaacatcccgcaatgtgagaacgaagacggctcgggtcaagctggactctgctactgggatagtgctcgaatgggcaacggacgcggtaccggcctgtacatctaccaagacggcattctaatcgacgaacgctactaagtctttcaatcagattcattcagtcgcgcggctgtctccgcgcttcatcaattcaagggagattcaaaaatgtctatcgaggaaatgtgggacgcgctgaaagataattacggtgtgtccgagcagactttgcaagttgtcaccaatatcaacggctacagtaccgacaccatgcatgacgtgctgtacgcggtagccgcagaacgtcaattcgatggcgaggtggcatgatggaacgctcttaacggcaaaactgtctgccgtaaataccgctgacctgactgcgatagcgcggcgcattaatccgcgcttcccgcccattcgggcaaattccaatcaatcaaaccttcacactaaggggtgtgtcatgtctgaagaagtactgaatccaagcgactttcacgctggctggttggcccaatcgttggccggcgacatctacgttatcgtaaaagccactgacaagacggtgacgttcgataaatacgataccgtctggcttaccgttcgacgtgtccggcgtaagcgtttcgagtggattgaaggaggctacttcaaggacggtaacttcacgttctggccgagtaattttttcccgcctgagaacgtctgcagtcgcaacgatttcatccaatcgcatgagtttaaggcggtggcatgatggcacgctactattacgctttctgctggacttacggtgtcggcaaaaaatgggatgacgggtcatggcctgggagtctcatggtgttcgattcgatggcggaacgtgacgcttgggttgctggcgacgtgtttgatggtaactggcacaatgaggccattacggccaaggaggcgcggcgtatcatggcggacactgttatctgtttcgacaatgatatggccgcacggtacgacggcagcaagtctgccattgaacggtatgcgcccattgttgaactggtcgaggcgtggcggcgtattgacgcgcaacttaacccgatcgagtactacacggactaaaagaatgcggctaggtgtcactaccacctagccgtgtgcttcaaataagtgaggtaatttgaggcgttgccattctagcacgcctcacaagaaagtgaggaaaactaatcatgtatgaaaaatctgcgatggaatttgcccggctactgtgcgcgcaactcaattacgtttacgcggatatgtacgaccaccctgataggtggcctaaccagttcgagctagccactgagtttgatgagtttcagaccactcgcactgatttaacggccttgtgcttcaaggtgaggcatgacttcatcagtagtgaccgtgaggcggcggcgttcatggttgcctaccggcggctcatggcgttcatgtcgcaacctatcgaggcggtggcgtgatggactatcgtaataccccttcgggtaccgtcttgggtgtccgcaagttcgctgacctacccaaggacgcctattttaaccattggtccgagcggtacacgttcaacagcggtaacgctttcagcgcttgcgtcacgcaagaagcacttgacttcttcaagcctgacatgcgtaagctgaccatattcattgatgaattaggcgaatacgtgctatggcgtggcatggctttcgaggtcagattgtacgctcaaaaattccgtaaagcctaatcgtttcccccgcccattcgggcaattcaatcaatcaatcgtaagggcatggcgctgaagccatgtccccgctgtttcaaaaggagcttgacaatgattaccgctgaagacattacggacatggtggatcgcgttgacgcgaaactcacgcctaaatgccggtatgacgggtttcagccttgtgagggtatctaccgtcttggcgattacgggtatgtcactgaaaccgagtatgacgcggctttcgagggtgagccctattgggctcgggacgcttacatgttggaaggtaacggcgtagggcatggcagaatagcccgactctacaatgacggtgacgttgaagcgttatccgattacgtcaatgagcgtttcgataacgaccagatggacgacgttttctataccgaagccaccgaagagggtgagtgttgagagtccgtcgtgttctgtttgtggccgtccttgtgacggcctttctcttgcttcggacgttaggcgttatccaacctacgcccgcttgcactaccccttatggcgttaacgacactgtgacgtgcgtttacgccggttacgcctaccacaatggcgtgcaactctgacaatcgttttggaatgaggaaaataaaatgaagaagctcaataatgacccgtcacgcaacgtgaatgccgtgagcggcatgtgggtacgcttgcgtaaggacaatagtaagtatgacgtgcggtacgtaaacgcccggctgaagcgtatctggcgattgtcagaaacgtccgctggcacgtcttggaatgttcaggccaagggtgagaagaaatacgccgaactgttggatggtatgaaaacaagccagtccgaccttgaacatggctggtttctggtgcctgacaatgagcgtaaggcttacgggttcacggttcccgtgctgacggggatggacgctaaaagcgtttccggtatcacggtggctgattttgagtcccattggacatgcgagaacgaacggtttacgactattgaccattggcctaagcaaggtatggtgcgtcatctgccgcctaccgaggttgaagatgaaagcaagtgggctggtgaggatgagtttcttgatgatgaaccggccccgatcactcaggagatacccgaagtgccgcccaaggtcaacagcaaggcagtcacatacgcgacaatgcccgaccttatgaccgccaaggaatgcccggcattgcaaggcatgggccatatccgttacttccgcacgtccaagggccgcaaagtggcttacatagctagcgctaacggtaagtgtgttgtcgcgtatcgtgcccgttatgagcgggggagtgacatggtgctcgaaacggccgtagcagagtacgttaagtcgctcggtttcgcggcctgacctgatggcgttggcacgccgccataattgcgtgccggtttcaaacctttccgattcgattttaaaggctttattatgagtgagcttaaagaaaaggccgcgcgactgttgttgaagtccgcgcgtgagatggctgacgagaacgaacgtgacttatccgccgttttcgattaccggagtggcttcatcgatgacttgcgtatgcgcgcggtgaacaccttggaaggcgtcgcgtgtatgccttccacgccgcctgacaatgatgagatggagcgtttgatcgctgattccggtttgtcgttggacgtgctggataagagggcgcgtgaagtgtacgactgcggttattccaccgcgtatcagcgttatcagacggctatcgtcatgcttatcgatgatttgctgggggtggattgatggaggtcaagatacctacgagtaagattcgtgaggttatggaatcgtcgggggccgtgtatacgccggataatatcgcggcggtgcgcgcaaacattccacttcacacgtctgacctgattttggcggcgttgaacgccaccgacttgcccgacaagcggtttgctttgccgctgttctagttcttaccgtccagctttttcctcacttccgctggacggcaacccatttttttctacaaaccaaatcaatatttctttaggagattattatgagcgccactatcaaacttacgttgagcgactacagcgtccgagaacgcttggacggctggttgcgtatccctacggtcgcccaatacgtgtatcccaatggcgaaacccaacagttcatggacatgctggacgaactggacggcgtggtacacgatactgaggcacagtatgaagacaggttctcgttcgatgattacgctgattttcttgagagtctggcacctgaatatcgcaaggcgtttcccatcgcgccggacgggtggaaacacaaggcgggtgagatttacatctactggtaaaactcggatactattctatcccaatatggtatatgattgataccacctgttaaccgttaaggaggttgttatgggtaagctggtagccaatgtcgatgatgatgtcaaggcgcgtgccgccgcgctctacgattccatgggcatgagcctgagcaccgccgtgaacatgttcctgcgccagtctctggtggacaacgggttgccgttcaggccgacgcgacacacgccggacggttatccggtgccgcctgttcacaatgcatacatgttcgagcgttcggagaagggccatgtgatactgcccgccgattgggatgattcggaggatgatgtctatgaccagtacgccaagtgaaccgcgcctgtatgacgtgtggctgatgtgggtcgagtttcccgaccatcccggtatcgggaagccgcgtccggtggttatcaccgaggttgacggtgatctggtgtcgggtatcgtggcgaagataaccggcaacactgattgggatgaggccggtgacgtgccgctgctcgactggaaggccgaggggctgttgaagccgtcgctcgtgcgctgttcgcaacgcttctacttcaacaggagcgaactgctgcaatggttcggacgactctcgttgagggacgcggagcatgttaacgacgggttgaaagccacattggacattccaccatacaggcggagcgtatagccgttatcgttttcatggcctcatggacttgttctatggggccattcttatagaaaccatcatttagaaccgcatcatagggctttctatggtgcggttttcacataaatcagcatttagacaggactttagagctgtctattgtcccgttaatcgttttaccggacaataacaagggagtttccatcatgaatgaagaaaccgaagtctacacgatttaccagcgcgtgacgcagatcgagaagcgtcacgtcaccgcgccgaaaggcttgacgttcaaccagttgagcgactgggttgacgaaaacggcgttggagacctgttggacattgacgaactggacaacgatatggtcagcgccgattacgaggacggctctcatgtcaagagagagtgggcgaattgattaccgctatctatcgttttgagcgtttcgaccccgccactaacaaggagttgtggcggcgcatacccggctggaaactacgtttcacgtggctgaaagcgtggctggaacgtgataaggcggctcgaatcggctaccgggcgtggttgtacgcgcgtgtttcaggtggcggcgaatggctgaccggcgacatgttggactggaatcaggaggcaatcaatggacgttgaacgtatggagaaagccttgcacgaggtttggaaatactacgacgaagcgggggagactgggcaaaactatgaacttaacccggataacctcgccaagttcgccgccgacctatgcaaggaatactcaaaaaccttgatacactgaaggccataggacttgtggccttctgggaattagcaaaaaccaaaacacaagagagcatggcaaacgtcacgccctaacatttttttcaggaggaatatcatgcctactcacgtttctcagaacgtcagggaactcaaggagctgggtcgaaacttgtacgcggccatgaggtcagatttcgaggtgaacccgaacgcttcagagcttccgatcgactatttcgagcatatcatcgcgtggtatcgtgaccataaggacgatacggccatgctgaacgacgtgatggaggcttgcggccgcgccggactatccgcaagcgacgtgaacgaactccgagattacgcggacacgctgttccaggcgggtgagctcgatgttgagcgcttgtgggagctgacctctgaatcaacggacgagtggggcaacccgacgccagtgccgagccggtacgaggcacaatgaacctattgtggctgcggggccatgcattaagattcagtgaatcttagtatgaacaattcatggcggaatcgttaagacattaacagataatcggttatctgttatagaatggcgatgctgataactgataaccataaatgtgggcccgattatacaagaaaacccgtggaacactcggaatagagtcgttccacgggtttttatatattgagactgttagaagccgccactgcctctcaatgaagcacactagggcggcattctcataagccaagcgtagtggtcgccaaactgactgccacggccttgaccacatcgaatgacgcgctgcctacggtggcggctatcctctgcttggttttcgaccacaggctatcggagcgtaccgcgtccagaaaatcgttgccgtcccaagtcaacgccttgaccgaagcacggatagtaccaccgttccatgtgccgttgatgtccgattcgaccagtcccgcgtcgctcatgatcttgaaatggtagacgatgagttgcatggagtgggtttcatcgacgaacacgctcgcgtcgaccggttccgtagcgtccgcgcatgttttcaatatcgtgcgcaccaagtccatgtcacgcttcatctctcacctgcctaactcgttcctgcacgtctcttaactgttttttagatcgtgtcttgttttcttaggttctccagcatggtttccgaacaataggggactggcttacgtttgatcgtgcgcagcagcttctcctcggccattgtgcagcggcatgggttcatcttgcagcgtctgcacacttgaatgttcacatggtcgccattcgtggacgaaaaactgtacaacatcgacccgaagggaaactcttcggcggcattgccgccgtcgatgatgaatatgtgtctcattggtcttctcccaaaccttttgctttgttgcgtgcatggtgcagctgttccgccaatgcgggcgtcatcgtggctaaatgtatcgaggcggtcagcatgtgcacggtcatgtagctggcaaacgccttgcagcgggcgatcatatcctgttgaagctcgggacggctgcggaacatgtcaggctggtagaccattatcttgcccagttccgccaacttgttgttcacggttttgagctgaccggggtgaatcggctggctcatgcgtcctccacggtgattttgtcggtagcgtgcaggcggatggtcaggcttccactcaacgtggcttcgatggtttgttcgtatccggtgattatgtccagcacggttttcgcttcccacgggtgtgcgtccacacgcagattggtgagcgtccccttcaactgattgccctcgtgattcaccgtcagggtttttcccatgaatcgcggacacagttgatcggcttcaatgagcattctcataactggcccttggcttttctcgtgtagtattcctcggcagacaacagttccagaatcggagtccgcttattggcctccaacaattcctcccatgtcatccacggatgaagacccgccagggtcccgcaccaagatgcttggtacggtgccttgtcatcgggtccgaacagccaactatcactgcggggagcataccgtttgatgatccgtccccaaccggtttgtgacccaaagcggatgcgcgcccagtattcgccgggcgaagccggttcttcaatatgcggtttctttggtgcggggcgtgtcgcgtaatcgaagtcagagtctagaacgacaagtttcaattccgtgtagaaacacctgccgcatgggtggactgcggcggcttggaggtcaacgaaggcgtattgcttggctttcttggaggtgattttttccgggtcgcccaaaactgtttcactcccgtagctgacgaacttgtacgtgttcgtgctgcctttgacgtgaatcaaatcgccgggcttcaggtcatcccagccgacgcgaatcttcttcattccgactccctttcgataagctgttccagttctttcatgttgtcctgcttgcgtttcagcgcattgcagcgatatatccactcgcccttgcgctggtagatgttggctatctcgtagttgctcaacagttcgttgcacgagcagacaagctgggggatgtccgactccgagtccgtttgcacgacgggtttctccccgcaggcggggcattcgggaatcggctcgtcaatcactgtcttcaatcgttggcaaccggtattccacttctgaacgtcctcgtcctcaaacaggacaaacgagaagatgctcgcggcatgatcgcaccattcaaagagcctccacgtgtctttttccagacagtagtagcggtaggtatgggtgacgcttacgagcttcggtttgggtgtgcgtccgcagatggggcatggttccactaccggtggttcaggttccggtttttcgaccggttccggctcctccaagtgcaatagtcgtttcagccagttcacatgcccctcgattccatcgactcgttgaacgccttctgaaacgcttcgacaccggcttgaacggcggtttgaagctggtcagagttgcagcacaccctcaccctcgcttgaaaaagcgcgtcaagggcggggtctttcagaaaaggcatggcaccggtcgaatcgattctgacgggaacgtcaaccttaaactcagtcagctccccttcctcacagttcacgctgagccacaccgacgtggaatcgtagaaaacgtgcttgttttcctcgttcattcatcctcctcgtcatcatctgattcgacgggcacatgcatcatgtcctcggcaagcgacagcaatccacacgtagtgaccggcgactggtattcgggcgtgtacacgcccaaacgccacaaatcctcgtgcatgtcctgcaacgtgctgcggtcaacgatcacgacgtatggtttcatgccgagaatcggggacaacgccttgcgtacccgggtttccatgtcttcggtttcagtcaactgattgtcctttcatggtttgggtgaatgccgtctggaatgcatggataccggcttcaacggctttttcgacggaaccgtcgggcggcggagtcacggtcacgtgcgctcgtggttgcatgtcttcgcctatgaacacgctgtccggttccagttcgcccaccaccggaacttccacggtgaacgtggctagttggagcgctttggagtacaagcccaattccacttccgtggtgccaagattgatgctcattgagtaatctccctgtgtccgaggaacttgttgacgaagaacgtctgacctttgcccgtgactttcggtgtcttgttgatggtcgtgtgaccgtccgagtgaaccacggtggtttccttgatctcgaacaatcccaattccatagatttctgcgtgggcatgttgcgagagctgccggttttcatcagccatccgttgtccctcagccacgcgaacaagcgcgtgccgccaatatccacgccattgcctttcaggactttcgccaagtcgcccacaaggatgctggtcttcgaggtttccacagcgtcagcgaacaacgctttgggacgcatccgttcgacctgtgcttgggccttctccttttccgcccgctcctgtttgatttgcgtggcaagccggataaggaagtcgggttcggtgactgccttttccaaagtcgattcggtcatgtacgcgccatgcctgcgaatcgatggcagcacctcgtgcgtcacccagcgtttgaactcgcgggcttcgggcttgcggctgcgtaacacgagggagtacaagccggactcggacacgaaaacgggtgccttgccgccgttctgagcaatgtccgtactacggatattggtgatttcatcggcatcgaggtattcccgaatatggttggtggccgtaccgagaatggcgcatacgtccgctccaaggaaccacgggttgccgtgttcgtcagttaggacacgcacctgaatgccgttgaagtcgaatggttgaatctgattgctcacttgtcgtctccttccttggattggttttgcgaagcctgcatgatctcccacacgtccgcgtcctccgacaggccggacgcgagacggtagaagtcactgaaccggtaaagcggattgctgtacgcatccttgccctgctgaggcaactggcctcgatgtatccaactacgcaaagtgctgcggttcacgcgcatcccgcacgccttgatgatgtccaatagttcgccacgggttctcaccgcctccgattggaggagacgtttcacccgttccgccctgatgagggctaccggcatactgaaaccgcatttcgggcatttcgccgtctccgcgtccgcgtagccggagagctggcccaagcactcgtcggcggggcatggcccgtacagtacggtttccccgtcatcgtccgtgaggaaacgacgcagcttgcgtgtcaggctgtgaaccagttccgcgtacacgggggtgctggaatgctccatgagtttcggatgattggcgatacggtgaaccatgtccgacagtggcgtggactcgggcaggttgattttcaggctccgcatccactcgtacaacgtgccttgcaaccccggataaccgtggtcatcgtccgcgtacagcagatcatgcagggcctcgcgtaacggtgcgggagcggtgccggattgaccgccgccaccgttcttgtgcccgtaggcgcggttgatgcgatactcgcacaggtcgggcagactgcgttccaaccatcgcaggtcgccggtcaactggctggcatgcttgtcgcacaagagattcagattcggttcgacgccatgtccgataagcatggacggcgcgtcggtgacgatatcccgccagcaaccgtggtaacggcagagcctcgtagtttcagtggaaaaagacaatagtgaccttgaccttcggagtttttgaaggtctcggacgtgtcagcaactctcaattatgccatcaaaccggtcatgattcagccggacggcgtgtcgccagaacctcgtccaacgccacgcccaaacccggattgaaaccaccaccctcacgcctgcgcttgggtttcgcagaaggcaagcgcaacgggtcacgcgcggtcaacgccacccgtcgagactcgtccgaggaacggcccatcatgcgttgacggcgatacagccacgcctgatctcccaccagtcccagacgttcgcactcccggcctatctgcgcttcggacggtttcgcaccgttgcgcagtttgcggacgatggcgttgatgtcgccgggaccgcaccagcgacccgtgctgttgtccgcgtagaagcgtcgaacggcctcacgcgcctctgctgccgtgatatccgaacgcagttccgaatggaacgcatcaagctgaacatcatcccactgcgcgttgccgtgatgcgcgttaatcagcgacaacaacgccgccgcctcacccttgctgagcattgaaacctccctgcgagtatcgggcacgctcctcctcggtcatgtactgccatgtcttcgccatgttcgcttcgagattctgctgactgcgggacttgaccggctgttgccgtggactcggggtttccggtttgggtttctcccagttgcgtgagtacagttccccgccgatgaaccggctgaacgtcttcacgaaccgttcctcggtggccccgacatacgctcgggttttggcttcaagaaactcacgcgggtcagccttgccagcggctttcacgatcttgggccattcgatttccaactgcattcgagcctgagatgtcttcccgtcgaacctgttcgtcgggtaaagacgttcaaggctgtcgagcagtccagcgaggtcgggctttgagggggtagggggagtaattaataaattactatctgtatctgtatctggcttcgttttgctttccgtttgcttcacaggtgcttgaagcacatctgaagcaggtgcttcgcttttgcttcccgtctgcttcgcacgtgctttgcctgaagcgatgccgccttgtcgcccagcttcggctttcttagctttcaactcctccacatccgcacgcgaacgtccttgtgcgtcaaggaaatcgtgaataaaccagcctttgagatagctgattccatcgccggttcccatcgtattcggttcaaaaaaaccgaggttttccagaatttccaaatcttttttcttggcaaacaatgtattcttcgccacaatttccgcgacaaaaccatcggtgagattgcgaactgaatacatgatcgcccaagtccacacgcgataggcattcggatgattcaaggcaagttccatgagcttcggattttcgtatccacgggcgctgaatttcgcatagatttccatatcgtcagccatgtttatgctcctatcagccagtacgtgtaatcggggaacaccatgtacatgaaaatcgcgcaggtagcgtagacggcagagacaacgacaaaagcgacaacaccaatcaagacgattgtcgaggggtcgatgatgcagtcgctcaggctcaaacggcatttgcgccaccagtaccgtaccagcagtatgaaagtgactgccagtacggttagttcgatgaaatgcgccaaacccaccagactcattccgtctccttcaacagttcgcatagtgcgtgaatagcgttctcgtcatcggcttcggtcatgctgtcccagaaatcatgttccacgccggtagtcgtatcggctttcagttgcatcagagtcgcccaatcatagggggaacggatgtagtcggttaggccgctgtctgagtgccaagggtatgcggcgaagctctctccgttggctttcgctctctgcgcataccagagggccttctccaagtcctccttggggtggcccttgtctttgtgtcgccacacgtatttgatcatgttgcccacgttgaacgagtattgttcggtgagcaggatgcactcgaacgggccgttctcataatgctgcggatggttcacgttatcggtcatttctcgtccctttcccgaatattctcaatcattccgcaccacttgtcccatgcttcctctctcgtatcggcataaggggcttccaagtgggtgcagtaaaacgtgtagcggcctctccattcgaatatgagcgggacacatccgcagaaggggcaacagtgccgaatcctcgatattagattgaacatgttcgtctccttaaatctcgtatgaaattgtggcggcttcgccagtccgagggcgtgccgctcgtcgccatcaacagcacgccgttgtcgtagaccttccaatggccgctactggcgcgtaccactgtgtagccgtgtgaggctatccaatgcatgagtttcctatcgtccccacgcgcggtcataagcccagtctccttgcctgttcccggctaagctgtaatctcgcctcgtggagatgttgcctgatctcgtcgcaaggcaataacttgtaggctcgctcccaacgctccacctcacgcatgagatcgtctaacagcttgttcatgacgtgtcctccttatcgcaacagcccatccaataatccagaatgaatttcttggctcgggggcatccgtattgcccgcagtcctcgggaatatccgggcgtaccacatacaggtcgtagctcattgttcgtctccctcgatcacgccatgaccggcgataagcgccaacgttttcaaatcggtgacaaccggctggttatccatgcttttcagcgagtccaagccgacacctttctggtggaacacgacgaaccaataaggcgcgtccgcgttaccggcttcggtgcggccctcctgcatccattccttcaaatggccgctgtaggtgctgtagtttttggcctctatgaccacgggttgcccgtgtatgcgcaggccggtaatatcgccctggtcgttgccaccgccatgctgcacttcacggtgaatagtctgctccgtgtcacccaagcgggcacgtaagtagttgaccacggccgattccatgcgggtccctttcgagcgctgtctgctcattcgtccctccaccattcagttgggtcatcatggaactggcagtccatgcagtttccgaaaacattgatgattcctccgcagtacgggcaatgctcgtactggacgggcagataactcggacgcataatcagaactccgggttgtctcgtagtcgtttttgcacgtccccgcgcatctgctcgatcacatcgacccgaagtccggtagccaagcgaatctcttctgccggacggttcgagtcttcaatgagtagttgccatgctttacttgttgctttgctcaatgtgagtctccttcgcaagatcagtgctgatacgcacccgatagtcggtgatgttccaagtcagatggttcaactgccagacggtgagtccaagaaaacccagcagacagaacgcttcaatgatgaccagcatcgtgttctttgacgcgatgcccaccgcgagggagaacgagtagaacacgtcccaccccaaataccagtacacaagccataattcgggtttgctgccgtcacgtcgttcgtaaaccgtgaccatatccttatcactcatttcaactccttcttctgctcctgttcacgccaccccatacgccttgcaatgggtagccgttgattctgttgtgttccgccgcataccgtgcgcattcgcatatcgccggacattgggcgcaggccttgagcgccaatcgttcctcgctggacgtggttgggaagaacaggtcagggtccatgtcacggcacgcggccttgtcacgccagccgctcaattcaattccttcttcgcgttttgagactacttacgctcatgattcctccttgagcgtggcgacatatgcgatggccttgcgttcacgcttcgcatacttctcgcatttgcgcttgagacgtttgaggctcatggcatacaggaagtctctgaagtcgccgtcctcgtagattttggctcgataacggccgcaggtgccttccgcgctgattcgcgcggtcaaatggtccgtaagctgaatcttgttcatgcgttttcccctttctcgaacgtctcgatcatttccatcaacgcggcctgatacgactcatgccacttggtgcggtaatgcattcggtcaacgcatttgaaccgatagcgtttctcctcggagcctttcacggttcctgtagcggccttcaggtgtctgccacattgggggcagtagaagctttcgccgttgagaatgaaatcggagtcccgcacgtcgcctttgccgactatccggtagaagtcatcaagccaactcattgtccgcctcccatttccttctctcgcgccatgatctccacttccacgtcgtcggcgagcatcctcagcacgccggcgagcgtgccatacgattcggcggtcggatacaccgtcttgctgacatacacgtcccacctgtcggagccttgatgattgtcggccttgaggataatgagcgggtcggcgtcgatgaaacgaccgtccttcatgagccgcactttgagcatcagacgtatcgaatccgcctgctcgctcgtgttgcccagaatatccagagtgctcatcgtctacctctcagttccttcttctcgttcgcgattgattggaggatggcctccaggtcgccgagctcgttcctgctcaaccggatgcggcggatgctgtcgccagcatgagtggccagcacccatgagcgggtgccgtttcggccgtctccgggaatccagctcagggtcacattcccgcaggaggcacctgtgaccatgccgcaccgtcgttcgatctccacgtccgtccccctcgtcgccttcatcgtccgtctccgtgaaatcgttgagcgatgggctggaacagctcatatcccttctgggcccacatctccagtgttttgaggatcacgagaatcgacagtgagtcgagcccgtcatcaaccagtttgggaatgttgttgtactctgtgtccagttccatacgcccgttccggccgctggtgaatgtgaatcccagcatgtccacgggcgttccggtttcctccggcgtgatggtcaaccgaaccttgaacttcctgcccaacggcatcgccttgtcactcatcgtccgcctccttgattgcctgttgcagtgcctgcatgatttgtttcgcctcgtccacgctcagataagcgcttgcagattggccaacggtcttgtgctccgggcgggagtcgtcccggtcgaggtaaaacgtcaccaagctggaagagccacgccgatgattggcgatctctacccgataaaccatgtattcgtcatcgtcaatcgggatagtgagcctcgtgccggcatagtggatgctgccaaaggtcaagtcgaacgattccgtctcaatgctcaaggtccatctccttttgtccgggattgtgcagatcgaaatgcttgcagccggtacggttcactccgtcagccgttaccacggcccacaatgcggccgacaagcccgcgatatacccgtcattccaagcaccctgcacgccatgcttggagtgcatcacaatgcggtcgtgaatggtcttctgcacgtcaaacggttcattcatcgtccgtcttcctgactcatgtaggtcaacgtgaagcatttatcaccgttgcatatgcggttccaagcggcgatattgtattgcaactgatacggggcgggcttccgtgaacaacctccctcgaagccgagcccgcagacagtgcagcggaacatcacgataaagaacgtgtattcaggcaacccctgcacgccgtcccgctcccatttcgccttgaccttgcccccacaacgaggacacgggctaatcctgtgaaacctcaccagactcacctccctcaagagccgcgttcaaatccacctgttcgatacgcgcacgctcctgtaagatgttcgcgtatgtccccatcgcgtacaattggctttcaaggagctggaaggagcaagcgggcgtgaagtccaacgtgccctccgcgtagccttcaagcatgtgcgccagcttgatgatgcgttcttgcaattctcgatgttcgcggatcatccgctgcttgtaatcactcattcttccgctgcctttccttgcattgccttgactgcgagtcgcatggcgtcgtagtattcggccttcaacgcgcaatcagaatcccattgagggtaagagtcgggcttcaacgcctcgtagaacgctttcgccccggctacgatttcctcgtccgtgggctggcgcgtggctccggcgataaaaccggcctcgtattccttgctcttggtcgtgccacgtatttcctcgggggatagacggacagctcgtcggaggacagcccacttcgcgtcactgctgatgatgctcatagtcggcctcgttcctgattgtgaacgaggcaatcgtccatagcctgagcaagttcctcgtcggtgatatcgaacgccgtcgccacgttcaccaaggtttgcaggacgtccgcccacttggccatcaggtctcggcgggccttggcttcgcctttgaccagacgtttcccggcctccaccatctccgccgactcctcaagcgtcttcaacaacagccacttgtcgggtgtgagacggctgaatgattcgaccgagggtaatttcacgatacggttgctcatgcttcctcgattccgttcggtatgacggtgtagtcatacgcgcgagtgtgaaagtcctccggcacgtaattccaattaggggttccgcaatgcaggcagaaacgatcttcggggttcacccggttttggcattgagggcaagaatgcggaaaaatcggactcatacctccgcctcctttgtgacgcggaaccgtttgttaatctcataccgtcctggacccagatacttgatcgaattgaaggcttcctcgtatgtgtcgtatgcctgggtgataaggttgctgtttcccagcccctcaaccacgaagtagctttcgacatgcgaatcgtcgggcatctcactggctttcttccaagggtttgtcgatgcgtccgctgggtcgtacagcatgatgatttccggatggtctaacacgtatttcgttccggcgttccatgccggggcagcggcttgccgacatatctcattcagggacgcgtcgcacaccgcgtccgcatcctccagtcgggggtcatgcgtccgctcgtactcggccttgatgccgtctgtgagtaggcgccttacgtcacggactgaaaggttcatgcttccaccgccttggctggacggaacggagcatggagggagaccattggcgaatcaattgcaatcgattccgaagctggggagaaaccgtactcatcgccgatgagctgagtttccagcaaggtatccgtcattcccggtttcacaaaagcaacgacgagccataaggcatcatccttgtcgagccacagcccttcatggtcaggcagcttcggcttcggtcgcaatgcgtaggcgaagtttgaattaaacatccaagtgtggtagttggtattctcggcctgtattatgactgcaagggtgctgtctgttttgtcatcatcatcgacagcggcaacggagaatctattgccgttcgtcgcgacgaaaatatcgcccttgcaaacatcgtgaatatcatcgatacgctcatactcggggtcatccaacaattcgacggtatcgacgtaactgggaatgacgggctgcgtatcagatgattcagccgagaacacgtgtaaatatgttcgatgcgcgtcgagttgcatcgaaaggctacatataccgtccgtgtctctggaacgccgcacgagcttccctatgaatacgtctccgttctccattgtcaccttgactcgcttatcgagattctgaatctccataagggtcttacctgcccagaatggtttctcactcattgacagcctccttggctagttgtcgtttacgtttccgcttcgcctcatactgggcgtatttctcgggatgctccgacctccaacggcgatggtattcagccatctcacgctgatgggcggcggcatacttacgagccgaagcccgagcctgagccaaatgctccgaccggtaccggcgtgcatactcattacgtttctcacgattacgagcgttccgccgattcgccagatcacgcagatgctgcgcatactcggggtcggttcgacgccgttccctgacacgacagttccggcacatgccatccttgccgacccggcacatgccaccgcaccaatcgcatttcggatgacgttcagttatcaggccggacagttcgccgccgttccggcaatagtcgatgaactcctcatcggtcatgtcatcaacgttcacagccacacctccccattagtgaacctgcggaacaacacagggtcgagcttgtacaacgcccgccgaaactgcgggtcacggcagaacaggatgaacaacaggcttactgcttcggcggttcgcatcgcgtccaacctcccttatcatccagaagcacccaaccatgttgggcggtgagaatcggcaccagttcggggtgatcgttgaaaccgctcacgatgtaccccaagctcatggcctcacgcggatgggcgtgaatccacccatgacatcccgtatcgccactcccacacgccaagatgaggttcgacgcctcatgcagtcccggccacttgtgtgaccggagtctgcgatgatgccggctgaaaccgctccaatggaatggtttgccgcagcggacgcaccggtattggtcgcgtgcgtccaccaaatccttgacgtgttgggacgggttagatctgcccatttccgtattcgtcctggggttggctccacgggtccgtaggctgctgatactgctgttgcggttgctggaatccctgttgcggctgctggaatccttgctgatactgctgctgcgactgttggaaaccagactgctgggccttgggtttcgcgctcaacaccgcaatggtgcgggccgcgacatcccaattctcataccgtttcccatccttttccgacactcttttggacaagctgccgttcacaagaaccttcacgctcatgttcggctgggacttcaactggcgaacctgattcaaagcatccttcgcctgattcgacaagggacgcacaccatagaactgaggctccttgtcaacccactggttcgtgttcttatccgtgtaacccggatggacgctgacgttgagaatactggaatcctgaaaatccttgatctctcccgcatatccggtaaactcgatgcttggttctccggccattacgcattcctcctgtaattgttcgtcttgtgtttctccatggcccgcctgttgcagaccagcatgtgtgattgggctccggcgcaatcaacggcaccgcatgtggggcattgggggagcgtgatcttgtccccgtgagcccacaggcatctggcgcacttgcagcccggcctcggggtgaaagtcactcgaagctcgcctccaccttcgtgaacgggaaacgatcatcccggacactggtcttgaagaactggctgcgggattgggactggcatgggaaggcggggggcgatggtgccatcatgggagagcaccggcatccaacgtttgccgtcatgcttccacaccgattcggtgcgagccttgtagaagcccggctccttcggaaggtcatccatcgtgtacggtccgcggtacgcatattggaaaaaggagtcatccacccaccacccgtccggaaagccgagctccccgatactcaggcacagggtctgtccgcccacacggtcagaatccgtcttcttcaccgtgtactcgttgccgttcttcaccaccattttgtcgccggggcgaaccttcgtgatatcggtgatacgctcacggaaagcatcatccaccagttcgatggacttgataccggagtaagggacgaaagtcgaggatgaacgaatggcgggagaaagagagacgcaatgagcaacgtttcccaccatgtcgagcgtactggtcatcgtgtcgccgttattccacgttatcttgacacgcagcccttccagctccccgcaggtcttgcctttccagaacggtttcttgtcatcatcttcagcctgcttgacggattccgtctcgggcttcgactcgtacacatgcacgttccgagcggaaccggtactgtacccatcgccaaaatccaagaaaaccacgagattgccttcatcctcggtctcgatgtacagtggcggcttatggcccatactcatgatgagaacgtccaccatgctttccgggttcttcatctcatgcagttcgcccgcataatgcccgtccgcatcatcaaactcaacccacatgcccggcttcacgtcgttcaaaccaatctcactgctcactgggagcctccttaaccttgtcgttatgctgtcgataagcgtcgatgaaccgttgcgcctgatattcggtcaacgtgccataagcgacccgcgtttgcaggacattgccgatgaaaccgttctcctgacccaccggaatcttgcagtcttcaagaatccggtcgatctgtgttttctgctcgtcggtcatacccttgacagaacgctttttgtagccgctcgtctcaccgtcatcatccgtggtcgccagtccgaacgcgccgcaagtgctgtagcgtcgcgcatacgtcaatgcggaaccgagggcctgcatgacgctcatgccacgcgaatcacccacctcgaccgggataagacaattactggcaatccacttgtccgtgcccttcttcctgacggccgtatccacatacaggcgtccgtcaaccaactgggtcggccattgcaggtcgaacccctgctcgtccacatagttcacgacctgagccagggtcgcatacgtgccacgaccgccccgagcgtccttcttaattaccgccatgattcaatctcctcctcttcctccaacagcttccagtcggggaacacgacatccttcgggtatttaggcaacccgtaggccctcatggcctccaacgggttctccgtgttgtcacggaaccatctgatgccctgcaaggcgtggtttatcttcggttccgccagttcggtgatgatgggcgaatcctcctgaatctcgtaacgcatccagtcgaacggcgggttcttctcctgcacgacgaactcgaaacccaacggccccttatattcgggcatcgtcaaccggtagagacgcatgtagaacgcggcctgaatgtgatacccgtactgccagcaggaacgctcgaactcgtccggcgacttcaccgtggtcttgtaatcacggatacgcagcacaccatccgggtcgggagtggacggcaaccagtccgccttgcccttaatcaacaatccggtatcagggtcggcggcgatcatcgccacctccggctgaccatccagcttcgtgaagaaatctccaaccatgtcccgcatggcctcgaccttctccacatcatcgggggaaagccatacgatatcctcgccctcatgcagtttcaatgtctccgcatacctggctttgccttccttggtgcgtaggttcggtttcaccagcacctcggggccactgcccaatatgagactgtgagccgccttcccgaactcgaactggggggaggacgaatgctcgccggtcagatactgcgaatacgccaacgggctgaccagatacttcttcaacgaggtctggtccaccgcgtcaaacgcgaagtaatcgtcatcggtcatctgctcgacggtcattgcccatcctttcttgctttgaatgcttccttgcctaaaacctcgatggtgtcggccaccgagtcgagaaaatcgtcaacgtcattcggagtcaacatgagaacccctcgactgcatggacaattgttcttcacgctccatcaggtgactgtgacgccaagtacgcgacttgccctgcttgtgagatgcctccgcataatcggccacatggtcgcggccaacgtctcccacgaccttcgacgcctcgttccaatccgagtacacgcgatcgttcacggccacatacttgtccgcgagataacggacgcaatcaccgagataacggattgctctggcgatggagttgaaatcagataccatcagtcggcgtcctccatatcgagtagtcccatacggtcgaatggggtgagtcccatgattatttcccttcactgggcttgattatttggttgtccttctacgccggcgctgacacgtccgaaacccttgttttgctggtttcgacgcaggacgcgaaggggttaaatttttctgagcgccaagccgggaatcgaacccgggtgtgatcgtgaagtccatgacatcggaacgcttcacgaccacggccaccgtgcgcttggctccaccggccggggcggaaagcaaggaataaaaagaccccggccggaagcattatggctactcgcgtaggaggtaggcgaacgtcagtggagtacagcagcagaagcccgccagaatgctccacggtcccgcatacggttggaacgcgaggacaaggaacccgcataccgtcaccgtcacgacagcaagcagcataaggttctcaaccatgtggcggcgttcgtccatggaatgctgccagccggagcagtgcgccccatacgttttcctgttcatgacagtcctttcctcgtggccggactcggattcgaaccgagaacgtccattgccgtcaccgtgtttctggtttctgagagatggatgacgagtcctatggtgtggtgacgatggtgcgtgtccagacaccccgaagggttccggccgatggttgccgcagcagatcgcagtatggtatttatttgcctgtagtcgataggtggataaaaaacgacccactgcggcaagacttgttattcctcgttcttctcgtcggcgcagtcagccaagtcctcaagggccttggcggcgaaacgcgcctgacttggagtgaggggacgggcaccgtaatcggtgtcgatttccgcgttgataagaccttcggcagtgacgttgccggtgaagtattcacgggtgtgacgttcctctaccacgagcttctgcgagagattacgattttggctgaccattgttttctttctcttgtgaatatcgtttaaaggccctttcggattaggcttgtaatcgccaaaccacatgccaaacccgaaaggaagaatgaaaaatgaccgacatcgacgcgcttcaaaaagcggctcgggagatcaggggagacatgagcttcctgaacgcctccaacaacgccgagacctggctgagacacatcaaaacgtcgatggactccacagccaaggccattgacattatcgccgccaaccagcgcgagctttccgaccgtctggacaaactcggagtctgactcacgacgcttgacctgttctccccagatttccgccaactgcgcggagatttggggaagcccggtttccacgatctgagccatccacgtgttgagaatgttcagctcgtcggcaacacgctccgacgaatccgaggcatacgaatagttgccgtcactcatatcgtcacctgcctatcgggttaagttcctttggaaaggattcggccttatccgccagatcattgagtgctttcgctatctcgcgggcctgttccggggtcagtttttcgcatacggaaagcggtgccgtcacctttacatatcccggatgcgcctcgcctttgaaaatgtgggcttcaaaggtcttcgtgacatccgcctccaacgggtcgtacatcaccttgccgataggggagtcgtagacatgttccccatgctcattggtcttgggcttagtcttgtacatgattcttcgattcgtatcggtccatcatcagacgaatgatgtcgagggaagtggatgccgtcttgctgttctctttgtcacgtcgagtgcggcaaggcgtcttccaccggtgcttgtaaggcttgctcacgctcatctcacgcctctttttcctccggccagtaactgtccacgagggcgatgaagtccttggcgaagctcctgagcttgcgcatgtccggtacgatctccactcctaccgtggcgtcggacttgagggcttccgtattctccttgctcatgctgttacctccatgtcagaagacttagaaagacgctgctcttcagggaagtcaagttcgccttgcaaggctccgaccgattcggtcagctcgaccagtttgcggttcaaacgcctcatggctttcacggtcctcccagatgggttccgaacaactctctggtttttcccgtatcttgctcggtgtctaatgaactcctcgactggaacacctttgccgtaaatgtgataggagatgttgccggggctgcaatcaagcaacttggcccatgctcgaacattcccctccacaccatcgacggtgattattcgctccaatgatttggtggcgttatcactgaacgtcatccaccgacagttatcgggctcgtaatccctgctgctgtcgatgcggtctagcgagagtccgtcaacataaccgttggcttcagcccattccttgaatttcgggaatgaatgccattctccgcaaaccttgattcctttcgcgccgtaatacttgtagttcgacatgttcgggttctcgcaacggcgcttcatgcttgaccagatcatgtagaggtgtgagcgacgctccttctgagtcatgccgtcacctccaagtcaggcgtctcagcgccgaagaacttctcatgcatgtccactgggatggtgagcagttcctcgaaactgactccgagcgcttcgcagatcatgtccagttcatcgactttgaaggccggctggccggcgagtcggcgggatagtttgcttacatcccatccgagcttcgccgcaagccatcgaaggcttttctgtgcgatgaagagacggtatcgaataccggctgctgttagtttctgtgtgctgctcatgtctattaacttagcatatgccaagtttctgtcaagactagacacgccgtatcgcatatgctaagatttaagtatggctaatccaaatgatttccgcgaaatgtctgcgttcgccttggcatttgcgacggagtataaaaagtacatgaaggcgcacaaggtaaggcagcgtcagattgctgaatacctcggtttcaccgaagcgtatgtcagcgaaagggtcaacggcaaaagggccatcgacaccaacgacgtagatgctcttgccgcattgtcgggcaccaccggccgctcgctgatgatcgaactggctcgcctcaccaaggaaacactgcgccagccggtatccaagacagcctcggtggcgtcccagcttgaaaaggtcataggcagaaagatagaagtggagaaggccgcttatcgggatgataacaagcgtgcggagtctggtcgcagtgaagacctggactgacctcaccattgaggcccgacgcatgggggtcctcatagaggacaagaagtttgatgatacgcagtgcggggaatacaatcccgatacccgcaccgcgtacatcgaccccaccatgagcgtcgaacagagaacctgcaccttgcagcacgaactcatccacgcgaagcacttcgatgacggactgcgcatcatgaacccggccaaggaggaatgcctgacccgcaaggaaacggcgttcgccttgataaaccccatcgaatacatgaaggcggaagacctgtacgggggagaaccctacgcgatggcgcaggaactgggcatcaccgtgggcgtcctgttggactaccggcattggttgcatgacaatcttgccgcacgggccgcatgattatgcaccctatccgtgtttcttgcaatcagggaacacggttcgtggatacaattagctcaccaaccccaatggagagaagaagggtgattgaactatgagcgacaacaatccgcagaagccgattccagacagtcaaccggcgacggtcaaaccggcgcagccgcaacaacaggtttccgacgcggacaaaaccaccgaacaactgcaacgtgaggtactgctgttgcagaagaagcagttggagaaggaggcgcaggccaaaccggtcacgttcggcaccatcgttggcgcaacgctggtcgcatggattatcatcggagtcgtcggaggcatcgtcgccgcgataggcttcagcttcatgatgtatgatattcaggagcagcgggatcaggagcagctagagcaatccctgtactcatattacgattcaaaatacagtgacgattccgattcctacgattactgacgtatcggaatgaagattggtcccgttctcctgtattggaggacgggaccattttgttgggctcaccgatatggtcacgccttccattcgatctgcttcaaatcgagcccgtcgcctatcgtctccatgcctcgcatcaaatcctctatcggcacggtgcggtaatgctcgctcatttccacggacgaatggccgacgatgcgttggatgatgccggcgtcaaccttcatgtggaacaggagcgatacgacggaattgcggcattcatgcccgtaccggttcttgtagtcggggatgcccgccctgcgcatgaggtcgcggaacgaggccctgtcatcaaacgcggatatcgggagtccttcgcgcgtcctgaatatcaggttgtacgggttcgggatgatgctctccgtggcttccagataccggtgcatgacggtgcccaactgggggattatcggcacgaccttgcctctcgcggatttcggcggcgtcaaagcgtaccccttgcacaggtgtatcatgtcgtatccgtccggcaccttccaccggtatcgggggcagctcgaaggccgtttgaaaccgcacgggtatcttccgtccctgccgggctccccgcacccatgctccttgtcgaggctttccagtttccagttcaccgtgtaggtgcctatccatatctcgccgctttccggtgtctccaacgtcttgtcccgccacaggtcgagatcgtccaatgtggcccccagtatctcaccctgcctcatgccggtgagcagcctccaccattggcgtgcgcccatgaacaggtcgtcggaggacgcttcgagcatgtcctgcatctgcttcacggtgaacgccttgcggtcctgcgtgccgctgcgcttgtccgtcgaaacgaccacgggcccgttgatggtgcgccggtccccggccagtcccgtgtccctgcgtttcggccttgccgcgctggtgacgggactggtgggtatcagccggtcggccaccgccgccttgaatatctggttcaggatgttgtagaaacccaactgccggtcgtatgagcatggggtgccgtcgaggttgcgcatgttggctatcatgcgctgcaccgccgaggcggtcacttcgcccagcttctcgttcgcgtacctgctcaggtggacgcttatgaggctcgcgtagttgccggtggacgcgggtttgaggtcgcgtcgtttcagctcgaaccattgcgccgcgtattccccgagacgggtggcgcggtccacgcccatgccccattcggttttctccttgagggcttcggctattttcctgtcgcattccttgtaggtcttggcggacacccatcggccgtccaccttggcctgccagttcacgtatgtctttaccgtgccgtccttgagtgtcttccgctgctcgtggcggatggggtagaccgctccggttttccttatcctaggcattcagcatcctccattctccaacattctccaacaaacaatccgtggcgaatggtattccaatggtataccaatcgtatcaaatcgttgaaattccgccgttctttccgagagagccattgatttcattatacgttactggatgtggaaggtttgctgaactagcaccttttgtttctgactaagaccccttggaacagcaacaattccaaggggtcttggcgtattggaaatgttcttggctagagagatacagatggatttagcaacattccgcaacaaataatatgatctaggtcttctgcacgttgcggggggtggttatggttcatccagatgagaacaggagcaaacctatgagcaagatgagtgacatgacggaataccatgcttcagcctaccgtttgccgtcaggcttcgaacactgctcgaaattgaagccggtggctgaggcagcgacggcgctggaccgggtcaaggccgtggtggatgtgctgtattcgccgggcggctgcccgtgggacggcaagcagacgaacaagtcgctgctcaagaatctgctcgaggaaacctacgaatacgtcgacgcggtggagactcacgaccgtgacaacatgcgcgaggaactgggtgatgtgttgctgcaatccgtgtttcaggcgcgggtctgcgaatcggatactgaggacccgttcggtattgatgaggtcgccgatcggttggtgaacaagctcatcactcggcatccgcatgtgtttgcggctgatgatgttgctgattcctctgattcttctgatgcttttgatgctgacagtaacgacgggggagaagctgcccaacccgaatccccggaagctgtgctggctctatgggaaaagatgaaacagcaggaaaagcatcgtaaatccgtgcttgagggcatttcccgcgctcaaggtgcgttgcctcgcgcggccaaagtcgtttctcgcatctccaaatcgccgaatgctgatagattgttcgcggcgtttgatgagccggctgcggctgatgctcagcgagatgatgtacatcctcaagcggcgaaccaatccgaatcaagcggcgacaattccgctgaacgggagaaggccgatgcctacgccgatgaaatcctcgccgtcgtgcgcaaggcccgcgttgacggcatcgatatcgagtccgcactgcgcaatcgcttgcgtgatgtcgaagaaaaagtcgccttgattgaatcagaaatcaacaacgattaagtccatacatgttttttgattacagatcgtaaaacctagaggggctgagttgccaacgactaccggcaagctggcgtcattgccatcctattcacgtcttagtggccccttcctccccggccatactactcaggcaaggcctgttgtaggctcgggtacgacgggctgtagcgccgaataaggatgaacgggaacagaacgaagacggactgagacgaaccgaagcggtaccagaggggagtggctcatgcaggtggcgttggagaacaacatcgtttttgtggtcatcgagtatttagcaatcctgtgttggggattatcgggcggacttgccgccattcgcaagggctacgacatcttcaccatcatgctgtgcggatggcttaccgcactcggcggcggtcttgtgcgcgacgtgatgctcggtgccctgccgccggtcggcatcaccgacaaaggctatgtgctcaccacgctgttttccggcattatcgtggtggtggcccatccggagatcaccaaactcaaatggacgatgactgtcatcgatgctctgggcctcggactattcgcagtcagcggcaccgcaaaagctctggcctacggttcctcaggcatgacagccgtattccttggcatgttcacagcactggccggcggcctcattcgtgacatcttcattggcgacgtgccaatgattattcgagacaaacacctctatgctgtgccttcgttcatcggctgcatcctgaccgtgctggtatggcgcggcgtaagctacggctggttcgacatgcgctcggaaatgctgctcgacgtgctgatcgtcatcatcgtggtggcgctgcgactgctctcggtaggcttcaacgtcactctgcccggagccgtcgaacgtcatcgcgtctacctgcccagcgaaagccgatatctcaagcgcccggtcatccatccgcacgccgataccgtcgatcccggcgataccaccaaggacgaagaagacaagcctcaggatggttcaaggccgcctcagggctaactgtcttcaaagaggtacatctggccttctgcagaatgctaactgctttcaaagaggtacctgaagcacgaaacgttgagtataagtgttgcaatgacggcgtttatagttgggttttcccgtattcggtacctctctgaacggagatgtcatttcgcaagaccgccaatgtacctctctgaacggagatgtcatttcgcaagaccgccaatgtacctctttgaacggagatacaaaaagtcccgcaagccagatgacttgcgggactttctaaaaccttaagaggcttatgctcacagagcgttgatcgcaacagcgaggccggacttgcggttggcggcctggttcttgtggatcacgccagcgccagcagccttgtcgagcttctgggcggcaaccttgtaggcggcctcggcggcagccttgtcaccggcggcgatggcttcgcgggtggcgcggatggcggtcttcaggccggacttcacagccacgttgcgaaggtgcgccttctcattggtgagcacgcgcttcttctgcgacttaatgtttgccacgtttactccaaacgatgtgtgttataaggacatacaaaagttagaggatagcatgaaccccggaaaaacccgcgcaatgccacgccgaatacagtccctcggctacactaggtgaagtttgagtatatgccaagaggaggaatgcgttggtcgtccaacacaatcagccgggttccacggatcagtcggtgattcgcaacttctgtatcatcgcacacatcgaccacggcaagtcgaccgtggccgaccgcatcctgcagttgagcggcattgtgccagagcgagagatgcgcgatcgcttcctcgaccgtatggatatcgagcaggagcgtggcatcaccatcaaatcccaggccgtgcgcgtgccatggacctttgacggcaccgaatacacgctcggtatgatcgacacccccggccacgtggacttcacctatgaggtgtcccgcgcactggccgcctgcgaaggcgcggtgctgctcgtcgacgccacccagggcatcgaggcgcagaccctgtccaatctgtatatggccatcgaccatgatctggccatcatccccgtgctcaacaaaatcgacctgccgtccgccgagccggacaagcatgccgaggagatcgcaggtctgatcggctgcgagccgagcgacgtgctgcgcgtctccggcaaaaccggcgaaggcgtggccgacctgctcgaccagatcgtcatggacgtgcccgccccgcacggcgaccccgaggcccccgcccgcgcgctgatcttcgactccgtctacgactcctaccgcggcatcgtcacctacatccgtatggaggacggcgaactgcatgaccgcgaaaaggtccacatgatgggcattggcatgacccacgatcccattgaaatcggcgtgatcagccccgatatgacccgcaccaaggcactcggtgccggcgaggttggctacatcatcaccggtgcgaaagatgtgagtcagtccaaggtgggcgacaccctgacttcggccgtccgcccggccgccgagccgttgcccggctatcgcgacccgaagccgatggtctacgccggtttgttcccgatcgacaacgcccagttccccgaactgcgtgatgcactcgacaagctcaagctcaacgacgccgccctgatctacacgccggaaacctccgtggccctaggcttcggcttccgctgcggcttcctgggtctgctgcacatggaaatcgtcaacgagcgactctcccgcgagttcggcctcgacctgatccagaccgccccgaacgtcacctacgacgtgaccgccgaggacggcagccagcatcatgtgaccaacccgagcgaattcccggacggcaaaatcaagaagattgtcgagccgatggttgccgccgacatcatcacgcccaaggaattcatcggtgcggtgatggatctgtgccaggaccaccgtggcattatgggcacgatggagtacatctccaccgatcgtgtcgagatgcactaccgcattccgctggcggaaatcgtgttcgacttcttcgaccagctcaagtcccgcaccaagggctacgcttccctcgattaccatgaggatggcgagcagtccgccgatttggtcaaggtggacatccttattcagggcgagaaggtcgatgcgttcagtgccatcgttcaccgcgataaggcgtattcgtacggtgtgatgatgaccaagaaattgcgtagtctgattcctcgccaacagtttgagattccgattcaggctgcgattggttcgcgcatcatcgcacgtgagaacattcgtgcgttacgcaaggacgtgctcgccaagtgctacggcggcgacatcacccgtaagcgcaagttgctcgaaaagcagaaggctggcaagaagcgcatgaagatgctcggccatgtggaggtgccgcaggaggcgttcatcgcagctctgtccaccggcgaggactccaacgaccgcgacaccaaagacaagatccgtgccgcccagaagaccgagggctagtgttcgaggtctacatccacgtcccgttctgcttgcggcgctgcggttactgcgacttcaacacctacacggctacggatcttggtgcgggggcctcgcgcggcaactatgccaatatggtcattcgggaaatgaaattgaccaagcagtggcagctcgaccacggcatcgaggagccgccggtctccaccgtgttcttcggcggcggcacccccacaattctcgccgcccgcgatctggtcgccatgctcgatgccgtccgcaagatctggagcatcgcgcccgacgcggaaatcactaccgaagccaacccggacacggtcaacgagtattacatcaatgagctcgctgccggcggcttcacccgtgtttccttcggtatgcagtccgccgtgccgcacgtgctcaaaaccctcgaccgcacgcatacgccggccaacgtggccgcaggcgtcaatgcggcgaacaaggctgggctgcgctccagcgtggatttgatttacggcgctccgggggagagcctggacgattggcgcacctcggttacgaccgccatcgatcttggcgtgaaccacatctccgcctacgcactgaccgtggagccgaccacgaaaatgggccgtcagattgccgccggcacgttgcccaaacccaatgacgatgacgaggccgctaaatacgagatcgctgacgacctgttcgccgccgccggcctcgaatggtatgaggtctccaactgggcccgccccggatacgaaagccagcacaacctcggctactggcgcaacgtcgattgggccggtctagggccaggtgcccactcccactacaacgcggtgaccgaggctgaccacccccagtcagcttcgctgacagcccccgccagcgggagcaagtccggagccattgcctctgcctcagctgatggacaggccaacgccgaactaggtatgatcaacgcgcatgggaacaactcccaagaaattcatgcccccgctggcgggggctgtccggcggatgccggactgggggtggtttctgtctcacacggtctgcgcagctgggacatcgcgcacccgcgtttgtggggcacggccatcaacgagaaccgtgtgccgtgggccgatagcgagacgatcactcccgaggaaaacctcgaagagctcatcatgctcgggctgcgcctgcacgagggccttgacctcgaccgcatcaaccgcgccatcaacgatgcgggtatgagcagcacgccccagactctccgaaccgtttcggttgaccaactcgcccccatgatcagcgaaggcctgattaccgtatccgataatcatcgagtggtgcccactcgtcgtggccggttgctcaatgactcggtaatcgaacagttcttcgatttcgtcggtgtatgagtcggtggtatggtgcgcggcagtcgccattacctgttcgctagttgtggttacaccgtcagagggagctatttttgttttaccggcgggggagggaaccgcgtaggactacgtccggggcgctttgcacgtagatcaggcggttggcagtgccgccggtggcctccccgtcatcgcggttggacaggatgctgtccacggcggcctggcccatttcggccagcggcagatgcacggtggtcagtggcggaaacacgtcggcggagtaggggatgtcgccgaaaccggtgacgccgatttcccgacccggctcgatgccgttggcgcgcaacgcggtcatcgcaccgatggccatcacgtcgttgagcgcgatgattgaatcgatgcctttgccgtcgtacagtgcgccttcgcccggcttcagcagtccggatcgggccatttgcatgacggccgcatagccgtcggtgcggctgaacttaccattcgccacggctttcggatccacggtgatgcctgcctcgtccaacacttccatcacgccggccagtcgttctttggaggagcgatgtgcgtcatcgcccttgaggatcgcagggcgcgtatacccggaatcgacgatcagctttgcgatggcgcgcgcgccgacatcgttcgccacgtccacggccgggaagggcaggttgcggttgagcacgaacacggcacgtccgccggatgcttcgtactgggtgagttccgtctgcaacgcctggtgttccggcgcgtcggtgtattcactttcggagatgatgatgccgcgcggcctggtggatacggacttacgcaccgcctccaactcttcgtgcggggtggctgccacgccgatggtcacggaaatgccgcgttcggccgccgccttgaccacgccttgcgatacggatgcgaagtagggatcggagatatcggagaccagcagcacgatgttcggtgcggtgcctttggccactgcctgagcataggcgttgggacgatagttgagcttggtggctgcttccatcaccttgacatacgattggttgcgtaccttgcgggtgctgccgttgagcacgcgggatgcggtggcgatggagacttgggcttctttggcgacatccatcaatgtcgctggcgattgcgccttatcgttctgtacagccacgatcgaatcgatccttttcttccctgaaacggaaaacgtgtctaaacgtttaccgcaacgatatcgcatttttgcttgcaatagtagcattgtggattggaaagcctgaattctgaacaaaaaaataatcacgcgaattacggaaaacgtttaccgtttcgtcgtgtcgtgcggtatgctcgaagcatgacgcgatacttatgcgcccctgactccttcaaagagagcctgaccgccatggaggcggcccgggcgatggctcaggggattgagaatgccgaccacgatgccgaggtccgttgccttcccatggccgacggcggtgaaggcaccgcacgcgcgcttgtcgacgccaccggcggatcgatgcgcgccgtgccggtccacgacccgctcggccggcctgtcgaaggccacttcggtctgctcgccgacggcacgaccgccgtggtcgagacagccgaagccagcggactggcactgcttgaagccaaagaacgcaacccgttgatcgcctcctcctacggcaccggcgaactcatgctcgccgccgtccgttccggagccaagcgcatcatcgtcgggctcggcggcagcgccaccaacgacgccggtgccggacttctgcaggcccttggcgttcgtcttctggacaagaacggtaacgacttggcacacgggggagcggccctcgccaatctgaccaccatcgatatcagcacgatggacccggctctcaagaacgtcgccatcaccgccgcctgcgacgtgaccaacccgctgaccggccccaccggcgccagcgccgtgttcggcccgcagaaaggtgcgtccaaagatgatgtcgccacattggacgccgccctcgcgcattttgcgcaggtaatcgacagccagctcggcgttgccgtgaacgacgtgccgggtgccggcgcggccggtggcatcggtgcagcactgaagggcttcctaaacgccgaattccgtccgggcatcgccatcgtcatcgaacaatccggactcgatgcggccgcacaatgggctgacgtggtgttcaccggcgaaggctccatcgacttccagaccaagttcggcaaaaccccggccggcgtggccgaaaccgccaagcgccacggcaagccggtcatcgcagtagccgggcatattggcaccggcatcgatgagctgcatgaggtcggcatcgacgcggtattcggcatcgcgcccggagccgccagccttagtgagctgctggccgatgcggccgccaacgtgacccgcaccaccgaacaaatcgtacgaaccctacaactgtgagcaggctcccgctggcgggggctggcgggcttcgcccgactggggggccagcgctgagaaccaccctcagtctcgctatgcgagacagctcccgcagcgggagcgagtaccggaaaggaagacgtgcgcgccacactgggaaccgtgagctgcggcgaactgaccgccgtgtatcgcaaagacagcgacaccggcatcgtggaactggcatcatggatcgtcgacgcgagctcggtcttgtgacatgattggtggtgatggaatcaacgatgagtccaacaaaacggcaccgcctcccattgcgcaatatcgcgcgcaatattacgcagcgtattggctctccgaatgcgtgtctgctaaacctcgtgttgctctatcagcgagctttccgactgcgcagctcaggcaacatcacgatgaacaggatgaccgccacaatcgcggtcagcagatcggcgatggcctgcgcggcgattacaccctgatagccggccagccgggagccgacgaacagggtaatcgccagcatcacaccctgcctgctgatcgacagcacaaaggcgccgaccgccttgcctgcggactggaaggtgcaggtcgtgaccatcacgatggctacgcacaccaggctcagcagctgaacccgcagcatgccggcgcccagcgtgatgatggtggcgtcctcgatgaagaatcccatcagcagacggtcggacaggctgagcaccacggtcatcaccagggcgaacagggacaggaacaggtaggaaaaacgcagaatgccgcgcagtcgaggcatattgcgggcgctgtagttgtagccgatcagcggctgcgcgccgaacgcgaatcccacgaaaaccagcaccgcgatcatgatgactttcagcgcgatgcccatcgcggctaccgcgtcggtaccgtaggggagcaggaacaggttgatcatgacgatgccgacgctctgcgtgaggttcgtgatcgccgaggggatgccgatggcgaggatgctcccgacctcccgggccgtgaccgccagacgccggcgcgcgcggtcgatgacggtccgcgggtcgatggacaggttgctgctgtgacgcagcgtgaaccagacgaaataggcgtcggtgcagatgttggcgatcacggtggcaccggccgaacccgcagcaccccagccgaacccgtggatgaacaggggattgagcacgatgttgaccgccgtgccggccaccgaaccgatcatggactgcacggcgtggccttcggtgcgcagcaggttggacggcgtcatcgacacgatgatgaacggcgagccgacgatgatcagcgtgtagaagtcggaggcatactgccaagtgtcgtcagtggcgccgagcagcgcgagcatcgggtcgcggaacgccaggcccagcaccagaatcagcaggccggtggcgatggcggcatagaagcagaacgcgctgagtcgcttgccgtcggcgaaccggtgttggccgaacaagcgcgagatgaccgaactgccgccgaggccgaagatgtcgccgagggcgatcatcacggtgaacactggcgcggtgagggagacgcccgccaccatatcggtgtttcccgtatgcgcgatgaaataggtgtcgaccatgttgtacaccaaggtgaccagcatgctgagcaccacgggcatcgccagcgagaaatacgccttcggaatcggcgccttttcgaagagttcgttatccatttccgtcccttggtgtttcgttcttcagtcactgtgcaggatgccgttcggcgtgcatcacaggcattgtagaggcaacagtgtggacaacgggcgggggagtatctcatgatgcggtgagggcgttgatgatgacgcatcgtgtattggcggccgtgtgcatcgtatgtgaacctgtgctggcgcggcgtacgcacgatgggaaaagaaagaatatatggaccccgttgtcccggttattgttcagttttactgtgttgaattattgcgttattcaattattgtggtgtgccggccgattgcggcctgagggggattgccttcgtatgtgtcatgcaatctcatgaacgggattgttcgctagattcagcgagcgtccttgttggcggcgttgatgatgtcggcgaacatcttggagtcggcgtagccggcgcgggcgatggcatccataccggagagggcgagaccgcgaatcatggaatccttgagagacataatcattacctttcgtttgcgcatcgccgtgagcggctttgcgattgttgtttaagctttgttgttatggggtccgtggctaatctgattggattgccggaccggagccgatgtctcagcgagcgttcttgttggctttgttgatcaggtcgacgagcgtgctgctgttggcgcgaccgcactggctcatggagctcaggccgtacacagccagaccgcgaatcatggaatccttgagagacatcatgtttcctttcgttggtcaaaaccttggggctttgagttttgtttatcggcttctttctgaaaccggtttcagaataacgcagtccgatgacaaacgcaaggggactattccgctctcggcgtttctggcggaatatcgccgttctttagataccattcggtagttaagaggttgtctagtcgaccttctgacggccttgttctgagcgtacggttttcacgaggtatggcctcatgtcgcggaaatcgtacgctgagtcgtcgtaagcgtacggttttcacgaaatggggcctatcttcaccggattttgggcacaccggccttgagcagcttggtctcaagattgatggggcgtagcagatcctcatagaacacatggacgatttcggtgacgccctgttcccggagatgccgatcacgtctgcggtcgtactccattttcgcctggaggcttgcgcgattcttgttgctgatgtcggcgtatttggccatgccgtcgtattctgccacgatgatgcggccgtctgcgagcttccaacagaaatcgacgcgatatgacattgcgggattgtcgggattcatgaactgcacctgcagcagggggatgccgaaagacaattcggtgatctggccacgcatcaatgattcgccgccgttttcgctcaggggatccgcgtacttcagcagcttggtcacggagacctcgtcgcagacgctttgaatcatcagcgactgcacctcttcgatggtcgtcagggactttctcagagccgaatcgtatatgggcagcgcctgtgggaatgggaatgccgcgcagtcgagcagcgttcgcgccggagtcgtcaagagaatgccgttatgcttccgcgtcggaatccgattgatatagatgcggttgagacgcgcctcgtctccgccgccgatgccggacttcgaggcgatgtgcactgtgccgtcgtgcagggaatagttgtgctgcagtccgtatacgcacgccgcactcaaccccgcaaatacccactgagggtggattgcggacaacgcacgtatgacctgcaatgactgttgctctctggtcatggtgttccaaagtgttcggtcggcgtacaggttcttatacggtgacaccagctccccggcatgcaggcgacgtttcagggcgcgccgttgcgcatcactggtgccatagcagcagcgacgctcctgcttcgcctgctgcagcagtgcagaaacttccttgtgttctttcatatctcgacgctaagggtgattttgatcgttgcacaagctcaaccggcaaatgtggatactatgtcacgcgaattgttgctgtggataacttgaatcgacgtcgacggctttgccgacggtcttgtcggaggcgatattagcctaggacaccttgctgcgccgccttccataccgaaaacagtcatcagtgacaccgggggcatcttcagcgtacgttcttcacgaaatcagctgccatttcgtgaaaaccgtacgctcagaatgactcagtgtacgttcttcacgagatgaggccccatttcgtgaaaaccgtacgttgacgacgattcagtgtacgttcttcacgaaattagggatgatttcgcggaaaccgtacactcaccgcaactcagcgtacggttttcacgaagttatcgatttgggtataggttccccgtcatgaactacaatgaatcgcggcgaaaaacggagaaccgaagtcggagcgcggctgaacggatatgggtgtgactggatggctgtcatagtgatgccggttctctaacatacgcaataacaacaactgacaacaacaggggagacaaggatggcgagaagtgcgggccgcacccggccggtgatcaaggacgtggccaaactggccggagtctcggcaccgaccgtctcccggtatctcaacggcaccgtcaacgtcaccgaagacaagcgtgaacgcatctgtgttttgtcaagttggagtaggccgtttcggcgtttcttttagtccatgtgagcggcgggtttcaggccgtttcggcgttggccggtcctgctggttgttggttattgcattggttattgcatgagggcgtgggtcttgcgccaggattcgccctcgaagcggatcatccgtccgtggtggacggtgcggtcgatgattgcggcggccatgttggggtcgccgaagatcctgccccatccgctgaactcgatgttggtggtgtagatgatgctctgggtctcgtacgcgttggtgacgacctggaacaggagcctgctgccgtcctcgtcgatgggcacgtagccgagttcgtcgatgacgagcagcggggtcctgccgatcgcggcgagttcccggtcgagccggttgtccgattgggccctgaggagccgcatgaccaggcctgcggcggtgaagtagcgtgcgggtatgcccttgcggcatgcgttcctgccgagcgcgatggcgaggtgggtcttgccggtgccgggagggccgaacaggacgaggtcgtcgtggccggcgatgaagtcgagggtcgtgatctgcccgcgcccgtagtcgacggggaagcggatcggggtccagtcgtagccgccgagctccttgtcggcggggaatccggcggccttgagcaggcgtgagcgtttggagcgttccctggattcgatctcggcgttcatccacgattccatgaattccatctggctgggggtcgcgtccgcgagctggtcggcgaggacctgacgggtcagaggcagccgtctggccagggtcatgatcgttgcgattctttcgccggtggacgcgcgcctgcgtttcatgtcgggcatgacgaccggcggacggtgggttcccatggtcaggcctccttcctttcccatggctgtcggggtttcatgaacacgtcgtatccggtcaggtcgggtaccgaccgctcgtacggcttctcgccggcggcgatgcgccgggccatggtggtcacactggcctcgtcgatcgcgtgcccctgttcgaccaggtgctctccggcccggacggcggcctcgaagccggacgcggcgctggccttggcgatgacgcggaacgtggtcctgcgtgtcttggcgtccatgcggtcgatggcgatcctgagtttgtcggggaaatcgtcacggatggtggaatcggtccatgcgtgggtcttgcggctcaacgcgggcaggagcgtggcggggttgcgcaccgtggccggcgaatccccgtacacgcgcggcagtctggcacaggtgcgtccgtcctgggtgcggatcgtcacgtcgaacgcgcgcagacccacgtcgagagtccagccgcgccacgaggggccggcgaggtagtagttgccgtcgatctgcacacgcccgtccttgtcggccttcctcacctcccaacggatcgcgtcgtacggcttggcgggaagcggctgcatatccatcttctcaccggcgaacaggccgccgatcggcgcgcccttgcggtaatgcgtctccttggccatcgcgtcgcaacgctccagcatgtaccgggtcagttggccgtgggactctgcgttgagcatgggcaccatgatgttgcggcgcaggaacccgaccgcgttctccacgctgcccttctcgttgcccgagttcgggttgcagaacctggtctccagccggtaatgctccacgaacagttcgaacacgtgcacgacggtgaccttgtcccacgcgatccgatggccggcgccggtggcgttgtcaagcaccagcgtcagggggaccgcgcctatgtgctcgaacaccgtgcgcagccccgcgcacacgcattcggcgttctccccgggcagggccacgcagtagcgcatgttcgaatacgggaacgtgacgaccaggcaatgcacgtcgacccggtccccgccgaccacggcctgcgccatgccgaaatcgacctgcgcctcgcccggatgccacttgagctccagatacccgtccgacgggaggcgatgctcctcgcgccaccgtttcacgtaccgctgcaccggcgaatacgagccctcgtagcccttctccgacacgagtctgtcgtacacgcgcttggcggtgtgccgctgcttgcggggcatgaaccggtccgcctgcagccacccgtccaccgtcgccctgaacggatcgagcttcgacggccgcgatacggagcgctccggtccgggagagcaatcctccctcccggcgtacttcgcgaccgtgtcgcgggccacgcccacctctttcgcgatgctcctccatgacatgccatgcgcgtcaagcaccctgatacgttgttgtacggacaccggtaccgtcattcctttcctttcccgagaaaaccgaacggtttgactttcaactcgggaaactagtccaggcaggacgggccggtgttcgtttctcaccacacgctgaagtggaccagaacctgccgctcacatggaagacatccacacgctcacacggcccactttctattgaacagacacacgcatcgccaaggccatcaaggagctgggctacgagccgagcattgtggcgcgcgctctgtcgaaccgggagatggactccgtggtggtgttcgcggccaatccttccgccttctccacgtccgaaacgaaccatggggtggaggccgccgcccgtaaacgtcggttcctgctcaatattgtttctttggacgagtccgacatggactccgtcaaggctcgcgtgcgcatgggtttgtcaatcaggccggcgggcgtgatcgtctacgagtacgaccgggccggcatcgccgcactggaatacattcccaaagatatgccgatggtcgtggtgggtggcagcttcggcgacggcgaataccaggtcatcaacgccgaaagggatggcggccgttggatgaccatgcatctgctggatctcggccatcacaccgtgttccatgtggggcgtccggaaggtccgaccgataacacccgcaccaatgggtggcgtgacgcgctcaaggagcgcggcgtcacggcacctgacccaatcatcgttcccgacgatgatttggaggagtcggtcaaggctgggcgcaccttgggccgtcgtggtgatgtgactgcggttttcgccggcaacgacgagaccgccatcgctgtgatccggggtctaagggaggttggtcgccgcgtgcctgctgacgtgagcgtcgtaggctttgacgaccgcaacttcggtgccatgtggaatccggcgctgaccagttacacccagaacttcctggacatgggggagcgatccttccgaatgctgttcgaacagatccaggccaagcgcgccggcgatgacgcgccgccctcgcaggtcgaggtggtgcaaggcaagccgtgtctgcgagcctccgaacgcgcgtacggcgacggcgaaatcgcgtagtcgatggggcgtgcgtatcaatcgatagtgactgtagcgcatccatatcgtgatgaggagtctctcatgccgaactgtaagcgcttaccttaagtagtttgtaatatggtttacgtcatactaatagatgttctaaatcatagtgttttgcaagggcttttgcggaaaatggctatttatcaacagttttcgaaaagtccgcatgacgggcgactgtgagcacgctttatggtaaccgctttccgtagtgttatcgttacagtatgacttttgaacaatcggcaactctgaagactcagccccagacctcgggcactatctcagcggcagacgccgtgatgcaatcggcccgcgacgaacgcatccccggcaaactcatctgtacgatcatggccgtggtcattgttatcgtgttcgtcgccatgctccacgccctacgtaaccggaagtaggttgtaggcgggattggtctgactggtatccgccacagccgggttcggtagagcggctaccaatcggccagtgtctctatggcatcgaatcctgttctgcgatgttgttcgtcaaggttgttccagtaaggtgattcatcggtgagcatgtcgtacgggagcttgatacgtctgcgatccgtgtggctatgtagtcgccgagtttcggcatcagggtcgctgatgagggatgcgggcattgcggcatcgtacagatgtctatctccagatccggcatggtctgcttggtatgcggcgctcttaagaatcaacgcgccaagtagatccgcgtcggtagtgggacgcacgtcgagaccgtccatgatggcgtgcaactgcaccatgagaccgccggtgagcagtcatgattcggtaatgcgctcggccaccatgtatacgatattccacggatgagcgccgctggggattgcaatgcgggaaatcattgctcatttccttgttgtatgccgtgatgagttctgtaagggtttcgagcccctgcgcgtcgttctctcgggtcgttggattcggccagatcagcggcgcatacgccgatgggcatgggcccctgcccggcgggcagaaaatcagcgatatgccgtgattcggcgggaggtctcgtactggccccagcccttctgttcggtagtggtaccgctacaccgactctccccgacactccagtgccgccgatatcagtgaatgcccagcctgatgtcggtagagtaaaggctattggcttggtctcgacggcgagacttctccaatggccaatatgcactgttgcaaaggagcatgcggtatgcaaccaatcaaagccattcaatacggctgtggcaaaatggcgaagtacacgattcgctatatgcacgagaaaggcattcaaatcgtcggtgccatcgacgtgaacccggaagtcgtgggcatggatgccggtgtgtttgcaggcatcggccccatcaatgtgccgattcgcgccgatgccgaggctgtactcaacgagtgcgacgcggatatcgcggtagtcacgctattcagcttcgagaacgaaatcgccaccatgtgcgagcagtgcttggctcgcggcatcagcgtgatcaccacctgcgaggaatgcatctacccgtggaccaccgatccggccaccacgaaccgtctcgacatcatcgccaaggaagccggtgccaccatggtcggctccggcatgcaggacatctactgggtaaacatggtctccaccgtcgccgccggatgccacagcatcaagaagatcaccggtgcggtgagctacaacgtcgaggattacggcctggctttggccaaagcgcacggttgcggtctgaccgccgaggagttcgaggccgagcttgcgcatcccgaaaccgtggtgccctcgtatgtatggaattccaatgaagcgctggcccagaagcttgggcttaccatcgcatcgcagacccaggccagtgtgccgtatttcagcgatgtcgacgtgtattccgaaacgatgggcgagatgattccggtcggcaaatgcatcggcatgtccgccgtggtaaccaccgaaactaatcagggcatcacgttggaaactgcctgtatcggcaaggtgtacgggccggatgatggcgatatgtgcgattggaagatcgagggtgaaccggacgtggagttccacgtggtcaagccggcgaccgtcgagcatacgtgcgccacaatcgtcaaccgcattccggacgtgctcaacgcgccagccggatatgtgacggtcgatcagctcgatgagatttcgtatcttacgtatcccgccgcgctgtacgtggcatagcctccatattttcaaggatgaaggccggcactcataagggtgccggccggtatcaggcggccagagtcgacgtgcgtggcatcacctggaactggatatggtcatgggtgatgtcatcgggccgttcatgccgtaggttcgactcgttcagcgtcaccatgcgatcgataaccgtacgagccattgcggggacgtccatcgccacagtgctgatgggtgggttggtgcaggcggagaaggggataccgtcgaatcccatgagccgtacgtcgtcgggcacgtggatgccatgttcggtgagttcgcggagcgcgccgatcgctatggtgtcagacatgcacagttctcatgctcccgctggcgggagctgtcatgcgaagcatgactgagggtggtccacagccgccaatccgtaacatcacccaacgcagcatttcacgatacggacgtttccgtatcgtattttcgtgtggtcaaatagacatttcgagcgaaaaagttcgaaatacccccataactggccataaaaaaattgcttgagaatcactattgacttttatggcgactcggtatatggacacatgaaacgtaaatgacatggagcgacggtactgtgtcaacagcaatgaacgaagaggcatgattttcttacgtgcccacaaccaattgaggtgatttcggtgacattcaaagccccgctcgatctcacggtccacgctccggacggtatgtatgatcccgccaacgagcatgacgcctgtggtgtgggtatggtcaccactttgaacaagcgtcctgagcgcaagatcgtcaccgacgccattgaggtgctggtcaaccttgatcaccgtggtgccgtgggtgccgaggagaacacaggtgacggcgccggcattctgatgagcatgccggatgagttcatgcgtgccaccgtgcccgccgaactgccggaagccggtcactatgcggcaggcatcgccttccttgaccgcgacatcgaaacctccggtcagcaggaacaggccattgccaagatcgtgcgcgaggagggactcgaagtcctcgcatggcgcgtggtgcccaccaacccggacggccttggcctgcaggcccttgccgccatgccgggattcaagactctcgtggtcgcctctccggacggtgctctggccggcgtggacttggatcgcaagaccttccgcatccgcaagcgcgtcgagcatgaggtgggcgtctacttcgcatccctgtccgcccgtaccatcacgtacaagggcatgctcaccaccatgcagctcacccacttcttcgaggatctgaacgacgagcgcatgaaggccaccatcgccatcgtccactcccgcttctccaccaacaccttcccgagctggccgctggcccagccgttccgtctgctggcccacaatggcgagatcaacaccatccagggcaaccgcaactggctctccgcccgtgaaggccgcctgagcagcgaactgctcggtgaattcgagccgctgctgccgatcaccaccccgggctactccgattccggcaccttcgacgagtgcctcgaactgctgcacctcgccggccgctccctgccgcacgccatctgcatgatgctgccgccggcttgggagaagaacccggatctcgatccggacgtgcgcgccttctacgagtacaacaacacgcttatcgagccgtgggatggcccggccgacatcgtcttcaccgacggcacccaggtcggcgccctgctcgaccgcaacggcttccgtcccggccgctggcagctcaccgatgacggctacatcgttctggcctccgaggccggcgttctgccggagatcgcgcaggaacacatcgtgtccaagggccgtcttgagcccggcgagatgttcttggtcgacaccgccgaaggccgcatcattcccgatgaagaggtcaagaggaacctcgctgcccagcacccgtaccgcaagtgggtggaaggcaactccgttgaaatgagcgacctgccccgccgcgagcacgtcagccactccggccagtccgtccagcgccgtcagcgcgccttcggctacaccgaagaggatctgaagctcctgctcacgccgatggccaacaccggcaaggaaccgctcggttccatgggtaacgatgcgcctatgcctgcgctttccagccgcagccgcatgctgttcgactacttcacccagaagttcgcacaggtcaccaacccgccgctggactgggagcgtgaggagatcgtcacctcgctcgaatccgccatcggccccgagccgaacctgctggccgattccgagctgcacgccaagaagatcctcatcccgctgcccgtggtcaactctgatgagatggcccagctcaagcgccttgacaaggcccgcatcctcggcggctactaccgcccgtacgtggtcaagggcctctaccaggtcgccggcggcggcaaggccctcgaagagcgacttgacgagatcttcgccgaaatcgacgaggccatcgccaacggcaagaacttcatcgtgctctccgaccgtgagtccaaccatacgtggggtccgatcccgtccctgctgctgacctccgccgtgcagcaccacctgctgcgccgccacacccgtacgcagatctccatggccgtcgaggccggtgatgtgcgcgagattcaccatgtcgcgctcctcatcgcctatggcgccgcctgcgtgaacccgtacttggcattcgaatccgtggaagatctggcccgcaacggctacctcaaggtcgacgcggacaccgctgtgaagaacctcaccaaggccctctccaccggcgtgctcaaaatcatgtccaagatgggcgtctccaccatcatgagctaccgtggcgcgcagctgttcgaggctgtgggcctgagccaggaagtcatcgacgaatacttcaccggcaccacctcccgtgtgggcggcgtgggccttgaagaaatcgccgaagaagtggccatccgccaccgcgtggcctacccgaaccagtggagcgcgtccccgcaccgcaacctgcgcaccggcggcgactacaagtggcgtcgcaccggcgaggaccacctcaacgatcccgaggccatcttcctgcttcagcagtccacccagcgtggcgactaccagatgttcaagaagtattcgcaccacatcaacgacacgtcgaaccgactcatgaccctgcgtggcctgatgaagttcaacaccaaccgcaagcccatcgacatcgccgaagtcgagccggcctccgagatcgtcaagcgcttctccaccggtgccatgagctacggctccatctcgcaggaagcacacgagacgctcgccatcgccatgaactcgattggcgcacgctccaactccggtgagggcggcgaatccgacgatcgtatcaacgacccgcagcgctacagccgcatcaagcagatcgcgtccgctcgcttcggcgtgacctccgattacctcgtgcacgccaccgacctgcagatcaagctcgcccagggcgccaagcccggtgagggtggccacctgcccggtgccaaggtcccgccgtggatcgccaaggtccgtcacgccaccccgggcgtggagcttatctccccgccgccgcaccacgacatctactccatcgaggatctgaagcagctgatcaacgatgcgaagatggccaacccgaaggcacgtatccacgtcaagctcgtttccgagttcggcgtcggcaccatcgcggccggtgtggccaagtgccatgccgacgtggtgcttatctccggctatgacggcggtacgggtgcagccccgctcaacgccatcaagcacgccggcaccccgtgggagatcggcctgtccgaaacccagcagacgctgatcctgaacggcctgcgctcccgcatcgtcgtacagtgcgacggcgagctcaagaccggtcgtgacgtggtcatcgccgccctgcttggtgccgaggaattcggcttcgctactgcggccctgatcgtggaaggctgcgtcatgatgcgcgcctgccagaagaacacctgcccgcagggcattgccacccaggatcctgagctgcgcgcccgctttaagggcaagcccgagtacgtggtcaacttcttcatgttcatcgctgaggaggtgcgcgagatcctcgcccagctcggcttcaggactcttgaggaggccatcggccacgttgagtgtttggatcaggacgaggccatcaagcgctggaagtccggcggcatcgacctgaccaacgtgctcaagcaggccggcccggtacccggcacgatcctgcaccagaccatcgagcagaaccacgagctggagaaggcgctggacaacaagctcatcgaacttgcccagccggccctcgaacacaaggaacccgtgcgcatcgaaatgccgattcgcaacgtcaaccgtacggtcggcaccatggtcggctacgagatcacccgccgttacggcgaggaaggtctgccggacgacaccatcgacatgaccctgcacggttccggaggccagtccatcggtgcgttcatcccgcgcggcgagaccatgcgcatctacggtgaagtcaacgactacgccggcaagggcctgtccggcggtcgcatgatcgtgcgcccggaagacaccgtcaccttcgacaagcacagcaacgtcatcgccggcaatgtcaccggtttcggcgccacttccggccagatgttcgtagccggtcgcgccggcgaacgtttcggcgttcgtaacggcggtgccacgtttgtagtcgaaggcgtgggcgaccacggctgcgagtacatgaccggcggcactgttgtggtgctcggccccaccggacgcaacttcggtgcaggcttctccggcggtaacacttatgtgcttgacctcgatatgaagaaggtcaacccgggtgccattgagtccggtgcactgctcttcaagtcgcttgatgccgaaacctccaagctggtgtacgcactggtcaagcagcatgccgaagagaccggttctcagttcgccgcggccctgctggaggactggaacgaaaccgtcaagcggttcacgcacgtagtgccgaagcagttcgtggccatgacgaaggccatggaagaagccaaggccaacaatgtagatttcaatgcgcccggcgcctgggaaaaggtgtacgagcaggttatggaaggagcgcgctgacatgggcgacccgagaggattcctgaaggtccgtacccgccgagagctggctgaacgccccgttgaggagcgtatcaaggactggttcgacgttcacgccgaaaccggcctgcaaccgtggacccaaacgcaggcggcccgctgcatggattgtggcaccccgttctgcatgaccggatgcccgctgggtaacctgattcccgagtggaacgacttggtccgtcagggcaagtgggaagacgcctacaaccgtctgtccatgaccaacaacttccccgaagtcaccggccgcatctgcccggccctgtgcgagcaggcctgcgtgctcggcatccaccagccgccgaccatgatcaagcttgacgagcagaccatcattgaccaggcctgggatttggactacgtcaagccgctgccgccgcagcgtctgactgaccagacggtcgccgttgtcggctctggccctgcaggccttgccgccgcacagcagctcacccgcgccggccacaccgtcgtcgtctacgagaaggacgatgccatcggtggtctgatgcgttacggcatcccgaacttcaagcttgagaagggtctgcttgaccgccgtgtcaagcagatggaggccgaaggcacccgcttccgcaccaacgtggaaatcggcaaggacatcacgtgggatgacctgcgtgaccgttacgacgccgtcgtggtggccatcggctcccgcgtgccgcgcgatatgaagattccgggccgcgagctcgacggcatccacttcgccctcgacttcctgcccgacgccacgcgccgtatcttcggcgtcaagccggtgcacgacatcaccgccaaggacaagcacgtcatcgtcatcggcggtggcgacaccggttccgactgcctcggcacctccatccgccaaggcgcgaaagacgtcaccgtgctgcagattatgccgaaagagccgtcttcacgcccggacaacagcccgtggccgactttcgcccgcacctaccagaagacttcctccatggaagagggtggcgagtacatctactcgaccgactcggtgaacttcgaaggcaccgaagaggagaaggccaaggtcaccatcgacaactcgaccaccgccgaaggcttcgtggccgatgaacacggtcacgtcaccggcctgaaggttgtctctgtggcccccggcgagaacggcccctttacccgacagcccggtaccgagcgcgtgctgccggccgatctggtcctcatctccgtgggcttcctgcacccggacaccgagaccatcctcgaccagctgcccgtcgaactcgacaagcgtggcaacatcgcccgcaacgacaagttcgccacctcccaggatggcgtgttcgtgtgcggcgatgccggccgtggtcagagcctcgtggtctgggccatcgccgaaggccgctcctgcgccgcagccgtggacgagtacctctccagcgagcagaccagtgagctgccggctccgatcaaggccagccagcgtccgatgatgctgcctcgctgaatctctccgttgtggttccctttcacgaggaaacttacatacaacactagatagtcctcatggcccctcatttgaggggccgttttctatttagcagcggatcccccttcgacttagcttctggcataagccagaagctaagtcgataatgccctctaagcaccatccggcaagattgcgtttcaactcgttagtgcccagcactgacaattcggtgtcggtaagcatcatgcgctcaaacgacaacgagtgttcccgccattgcatcagatgtttgttgccaagaccctgccaatgatgtgcacgtactcttgtgtcggtgcttccttgcgtatgagtgccagcataccggcgacgaagagttgctcggtggtataggagagttggaaggcgctcataccaaacactgcaatatccgtatatcatgtgggcggctatgtgcaccgtccacatgatatactcactcttcttgctgggtgagtcctctccgaaggaatctttctattgacgagatttcagggatgtggaatcttcaccaatcggtacagattaagaatctgtgctagttgttgggatgattaatccagtaggcgatttcgcttactgaatcttcggatggcgcgatgctgacctgaccctcagaggcgccttccgttcgtatggttagtgtttcttgcgcaatgtcatccgtacaggagacggtgcgatcctcgtactgttctccgatggagaatgacgcgttgagcgtcccgctgcccatgcagtacaccgtgagctggtaggtgccggcatcccatggtgaactgtcagtatcaagaatggacatggtttttcgtttaccggtctcatcagtctgatagctgggacgtgcgttgaacgacgcgcgaaacgattcgcgattgagctctacggcatcctgtacggcgttatcgagttttgtcacggagcgtttgtcgagaacatgctcggaaacgggtgccttagcaggttgcttcgaagccgcagaatcattgctactgccatgtggagtcatcatccatatgaggccgacggcaagagccaataggctgatcgcggcagcgatgattgcggcctttgtttttgttgccagtcgagtgttcataatggcctagctttcccaatatcggtaaccccatacgttcgcactgggcacgattgcgcttccagaagcgagcacttggacattgcatggagcgacaatggtggcttttttggcggttctcatgataatccctttcagggggagaaagcgtcggctgattgtggtcacgaatatcgtcagttcgaaccgaacgtggacgacaacgttgtcgttggagaagtcttcaagaaatatgttgatacttaatagattacattgcatgaaccttttgcgcttcattgcaactcatatgaatggacagtgtttgcgatttctccttacaaaggtggtcctacttgttcggatgtagccaacttcagtgacttggttctgaaaatgtcgttagccgtcgttgtgagtaccgtcatcattcgtgtaacgtcctcgcaaattctccgtagtcgcgtccccgaggatgtagaaactgattaattattccaaaaatacttgtaatgtctatacttcgagaatcttgcatacatggttaacatgaagctcctatggtgtctttcgtcgccaaaaagacgacgccaaaatatatgggagagattcatgaacacacgtcatgtcacttcactggtcgcggccggtgcggcaattgtcatgctgctcagcggttgcggatcgactggttcattcagcaatgccagcagcacgtcaggctccaatatcatttccgtctacggcagcgaaccggcacacccgctgttcccaggcgctgtgaccgaggcaggcggcggcaaggtcgtcgatcagctgtttgcaggcttggttacttatgataccaagggcggcattcacaacgaggtggctgagagcatcacctccagcgacaatgccacgcattacgtcatcaagattaagaagggatggaagttcaccgacggcacgccggtcaccgctcattcattcgttgatgcctggaactacaccgccaacagtgccaacaagcagggtagcgccagcttcttcagcaccattcagggttatgacgatttgcagaagtcggatgttgacccgagcgcaacgctctccggtctgaaggttgtggacgattacaccatcgatgtgaagctcagccagcctgattccgcatttccggtcaagtccggcagccacgcgtacatgccgcttccggaatccgcgttcaaggatccgaagaagttcggtgagaacccggttggcaacggcccatacaagtttgtttcctggagccataaccgcagcatcaagatggtcaagaaccctgactacaagggcaatcgcgtggccaagaacgatggccttgacttcatgatttacacatctccggactccgcctacgctgatttgcgcggcgacaacctggacttcactcacgccatcccatccaccgcactgaagaccttccagtccgataagtcaatcaaggcttacaatcagcccggtggcaacaccctctccttcaccattccggaatggcttgaccacttcggccagaatgaggaaggcaatctgcgtcgtcaggccatttccatgtccatcgatcgcaaaaccatcgccgagaagatcttcaacaacacgtccacgccggccgttgacttcattgcagcgccaatcagcgcctactccaagaaccttaagggcaatgaagtgctgaagtacaacccgaagaaggctaaggaactgtgggccaaggccaacgccatctccccgtggagcggtgagttcggcattgcatacaatgctgatggcactgcgaagaactgggttgaggcaatctgcaactacatcaagaacacgctggatatcgatgccaagagcatcccgatgtccacttccgacgagttcctgtccaatgtggattcgggcaagatgacctccgcataccgcagtggttggggcccggattacccgtccgcagacaactaccttgtgcagctgtacgattccagctcggccgatggcaagggcggcaacagcggcaactacaagaaccccgcgttcgatgccatgatggacaaggctctttccgcctcgtccaccgaggaagccgacaagtattatcagcaaggtgaggagattctgctgcaggaccttccggctatcccgttgtggaaccagaatgccaccgcagtcagcacctctgcagtctccggcgtagaattcgattacggtggcggcccagtgttcaccgcactgaccaagaagcagtaagcgcgactttgctggaaagagttggccttgctataggtcgggttgccgaccgattaccatgggctgagccaatctgacctctgttggcccccgctggcggggctgtcggcaaagccgactgggggtggtctcaaacagcagaccacccctaatcttgttatatgagcgagttcccataatcgggagcaatcgagaacatacaggagcacattaactatggaattcaccgtatccggcactaccgtgcgattcgatgaacgaacaatgcagttcgcttttacgcgcgacggtgccgaatggaatacctgcgctgatttcaagccgaccctgcaatgcgcgcaaggcaccttcgcgttcgcagatgccacttccatcacccatgagcagcgtgaaaccggcacgggaaccggcattcgcagcatcttcaccggctttgggcacagcgcatactcctttgaaacctatgtatgggtggagcgtgcctcaggcgatgtgctcttcgaatggattccgctcaatgagcaaggcctgaacatcactaatgtgacgtggcccgcagccatggacttcgattgcgccgacgaccatgacacgacactcatcacccatgagcaaggtgtgatgatccccaacacatggcctaccgccgtgagcaccaaagatatcgccttcgacggccgcttcgaaacggctggcggttacatgccgtggttcgcgcagcttcgtgcaggcggacacgggtatatcgccatctgcgaaaccccatggaatgccggttacggcatcgaccatcccagcaatggtccgtacacccatatcaatacttggtttgagccaagcctcggcacaatgaattatcgccgcgtggtacgctaccagttcctcgaccacgccgatcacacggcggtgtgcaaggcctatcgttcgtacgtcaacgaacgaggtcgcttgcgtacgctcgccgaaaaggcggcgcgcaatccctccgtgcgtgacctgattggtcgttcatgggtgcacgtcggcatcaaaaccaaagtgcagcccgactcgttctactatgacaaggaccatcccgaaaagaacgattcattggtcacctttgcgcagcgcgagaagcagatgcgcacactgcacggcatgggtgcaggccgactgtacatgcacttggatggttgggcgcagcccggatacgacaacgcacaccccgactatctgccggcctgccaggaagcgggcggctgggaaggcatgaaatcgttggtcgatgcctgtcatgagcaaggtgatatcttcggcacgcacgaccagtaccgcgattactacttcaccgcgcaaacctttgatgccaacaatgcgattcggctggcagacggcacgatgcccgaacacgcacgctgggcgggcggccaccagacctacctgtgcgccgagctcgcaccggactacgtacgccgcaatttcacccagattgccgcgcatggcatcaagctcgactgtgcatacttggatgttttcacctgcaacgaaggcgacgaatgctcgaaccccgaacaccgcatgacccgccgcgaatgctttgaccgccgcgccgaatgcttcgaatatctgctctcgcacggcatcctctcctcgtccgaagaggtatcggactgggcagtgccaagcctgatattctgccattacgcaccatacgacttccagatgcgctcacccaacgagccgcgccaaggtgtgccggtgccgctgtataaccttgtctaccatgattgcgttattgaaccatggatgatggagcgtgtggtgaacggcgacgattacatgctgtacgccttgctcaacggcggagctccatacctgattcgcgatgccgcatacatcggcgttgacggcgacatggacgacgaacagcgcgctcgcacggaaaacgacatcgaacgctgccatacggtcgctgcattccatgagcgggtcggcatgcaggaactggttcgtcacgagttcgtggatgatgatccgctggtgcagcgttcggtattcgcggacggcactgcggtcacctgcgacttccatacgcaaacctatcgcatcaccgactgaaaatacaatgacacacagtgggttccgatggactggtggcaaattgccgccgacaagcgagtaatatagccaacagtgtcaccgtcgaaacaggagtagtgaaatgccgaatcgtgcagaacgccgtgcccaagccaaagcaggccgcaggggagtgccgtcgcagtatgaccagacccgtggccgcggtcgctcgggaatgattgacgaataccagctgcagcagaagtcccagcgtctgcaggacggcaccgacggcaccgaatggaagcccagcggcggtacgattgcggacaccgaaaccctgctgaccactaacccgaactacacgaatccgaagatgttcaaggcaccgcattcgctgcgtcagtggttccgcgtgggcagctggacgctgatcgccatcgcgattatcgcgttcttcgtggttatgtggctgccaagccatccgatgtggctgatcatcaccgtttccgcggtgttcattgtgggtgtgctgagcctgttctttacggctggcgattccaagcacaatccgaatctggaccagaacggcacggccgtttgatcttttgcccggtaaatccggcttgaaaagcaaaacgcacgacggaagttgtgcgttttcttgtatgcggtgccctaaagtaagaagtgcttgagtttctttctgacgcacgaaggagaggcagtccgatgaaagttgatattctaacccgcgaatacccgccgcacgtgtatggcggtgccggcgtacacgccgaggaactgtccaaggtgcttgccgagcgcatcgacgtaaccgttcgtgcgtttgatggcaagcgcaccgaggcggacattcctgctatcccgaatgctgccgatgctaagggcagcttgaaggtcgtcggctatgacacgccttctgagctggctgatgccaaccccgcattgaagaccttcggcgttgatttgcagatcgccaatgatgtggacgccgacatcatccacgcgcacacctggtatgcctgcttggcgggctacatggccaagatgctgcacggcactccattggttattaccgcgcactctctggagccgttccgcccgtggaagcgcgaacagctcggcggcggctacaatctgagctcctgggccgaaaaagacgcgtacgagcacgccgatcgtgtgatcgccgtttccggtggcatgcgcaaggatattctgactgcttacccgaacctcgatccgaacaaggtggttgtggtgtacaacggcatcaccatggccgacttcgctaccccggcaccagacgatccgggttggaaggtgttcgagcgttaccacatcgaccgctcgcagcccaccctgctgttcgtaggccgcatcacccgtcagaagggtctgccatacctgctcaaggccctacatctgatttccaaggacattcaggtggtgctgtgcgcgggagcgcccgacaccccggaaatcgccgaagaggtcaagaccgcgttcgccaagctggatgaggagcgcggcaacatcgtttggattgaagaaatgctgccgaagtctgagctgaatgctttggaacacggctgtgatgccttcatctgcccgagtatttatgagccgctcggcatcgtgaaccttgaggccatggcctgcggtctgccggtcgtcgcatccgccaccggcggtattccggaagtcgtggtcgacggcgaaaccggctatctggtcccgattgaccagctgcacgacggcaccggcacccccaccgatccggacaagtttgtacatgatatggccgccgctatcgacaagatcatggctgaccccgaactcgccaagaagatgggccaggccggctacgaacgcgcccgcgacgtgttcagctgggagaccatcgccgacaagaccgtggaagtctaccagtccgtgctcgacgagcagaagaagtaagtagcgctgcaacgagtgcccccctcagtccggcggtgcgccggccagctcccctcagggaggggagccagaatattgtctcttggctccccttctttgaggggagctgtcaccgtaggtgactgaggggagtcatatatcgtccggtttcttggctcccctctttgaggggagtcgtccgcgaagcgtactgaggggagtcctcagatcgcgaatcatagttagtatttcactcatgacaaacaccgtcctccaactcgacaacgtcgaattccggcgtaaccgtcgcgtcattatcaccgacgtgaacctcaccatcaacgcgggggagcgttgggtgctgttcggtccgaacggcatcggcaaatccaccgcggtcggcatgctggccacccgcaccttcccctcagagggccgcgtattcatcctcggccatcaactcggcaaatacgacgtattcaaactgcgcacccgcatcggtctcgcctcggccgacctgggtcgccagttccccgagttcgaggacccgctggatgccgtggtcaccggcctgtccgccgtgaccgggcgctggcgcgacacctacacggacgaagaatacgcccgcgcacgccagctgctgcgtgatttccgcgtctcctatctggaaggcaaggagatgtggcgactgtccgaaggcgaacgcacccgtgtgctgatcgcccgtgcgctgatgggcgatcctgagcttttgattatggacgagccgaccaccggcctcgatctgggcggccgcgagcaggtgatgcgcacgttgagccgaatcggcgaggaaagctctgaacgcgccgtggtcttggttactcaccgtctggaggagattccggcaggcttcgatcacatcgccattatgggtcgcaagccgattcccgccgaagatgccaccgaagcgggcgtcgactcaatgggcaatcccggtgctggcaccatcgtctacaccggtgcgctggaagacggactgaccgacgagcgcctgtcggaattgttcggcatgcccatcgaagtccagcacactcacggccgctgggccgcctacgccgtgtgatgccgttttggtctccgccagcggaagccgtcggccaagccgactgggggaggtgtcagcagtactttccctttttcggcaggttttatttttctcttcgccccctctggaggtggctgtcagcgtaagctgacttgggaaggttcgacatatgacggaaagcgacatgactagtagcaaactcgtattcattgatatcgacggcacgctggctgatgagaatcatattgtgccggagtcggcaaaaacggcgtgtgcgcgggcccaagccaacggtcacaagctcttcatctgcaccggtcgatccgtgccgaaaatcgaacgcaacattctggatcttggattcgacggtgtagtttccgtagccggcgcacaggcgaatatcggcgataagctgctgttccagcacctcgtatcgcccgaagccatcgatgcggcgatggcctattttgccgaacaccatatcgagagctaccagtggcagggtgcggacggcatgtacatttccgaaggttatcgccgccatctggagtccaagggcaagacgtggaatcgtggtgagtttgcgcggttctggcatttgctggacgaggtagaggttccggctggatctacgctgggtcacacgattcatgtgagcaagggatcgtatttcaccgggcccgagccggatgtttccttcgagaacactcagcatgatcttgccccctggttcgaactcgtgcacggctcatacgacaagatctcgccgaataacggcgaactgctcatcaacggcatcgacaaaggcaccgccgtgcgcgacgtggcttccttgcttggctatgccatcgccgacaccatcgccatcggcgactccgataacgacaccgccatgctcaaagccgccggcacatccgtggccatgggcaacgccatccacggcatccaggccttctgcaacatcattaccaccgacatccgcgacaacggtctagccaacgccttcaagacattggggctggcgtgacgagtgcgaagtccttaccagttgcgattgcgcaatttacggtggcggaggagccggaacggaatctggagatcatcgacggattcgcgcgtgatgcggcggcgggcggcgcgaagttgctggcattgccggaaggtttgattgcgcggcgcggcgatgacgattcatatgctgccgcgcacgcgcaaccactggacgggccgtttgtagacggcttgcggcgtatcagcgcgcagcggcatattgtgctgatgggtaccgtgcatgttgcgccggagcaagtaacagaacgggatgcagattcccgagtttccaacacgttccttgtgattcgcgatggtgaaattatcgctgaatatcgcaagctgcatctttacgatgcgttcgcggcccgcgaatccgacgtggttctcccaggagatgcgttgccgcctatcgtcgatattgacggttggaaaatcggcgtcatgacctgttatgacgttcgtttcccggaaaccgctcgctcactggccgtgcgcggggcagatgcgattgttgtaagcgccgcttgggtgcgcggcccgttgaaagagcagcattggaagctgctgactgcggctcgcgcattggaaaacacttgctatgtgttggcttgcagtgaggtgagttcgcggaacatcggatgctgtcgcatcatcgacccgatgggagaggtagttgccgaagcgggcgatgagggagccgagcttattgctactgggcttagtcgcgaatgccttgcttccgcacgccagataatgccggttctgcagaatcgccgttttgccgacccgcagttgcccgattagtcgagtctttcagagcccgctgccgacgctttgatggcatattactgtcgaatataacgtgccgaattattgacgcaatcagtggtcatcgaaagtctgtgatagatgtcgcgggctcggacgcctatcatgggacgcatgactgctactgttcatgattccgcccaagctcctgtatacgctcgtctgcaagaggggagtgaggctcctgatttcactctgccggcgattgtgcccggcactgcggagaacggcttaatcaatctgtctgacgtgctcgaggacggacgtagggttgtactgtacttctatccggcggcaatgacgcccggatgcaccactgaggcttgcgatttccgagataatctcgcacgcttggagtcgcagaatgttgcggtgctcggtgtctccaaggattcactcgagaaactgcgcaagttcgccgagcacgaccatctcacattcccgctgctgtctgatcccgacctgaccgtgcacaagctgtacggcgcatacggcgaaaagaagctctacggcaaggtgcacgtaggcgtgattcgctcaacgctcgtcatcaattccgatggctccgtggcgattgcgcgctacaacgtgcgtgccaaaggacatgtcgattcgctattaaaggcactggaaaagttggagaagctggagaagtagtgcgctctcgttgttcggacacagtggttcgtgcatagcagttccgtgcagtatgtaccgcatgaacctctgccgtatgaaccaccggttgacttctcggactcaccggcaaatagtgagaccgtgggcgcgcagtacgtctatggctggcatgtaatcgagcgatgttgcggtgggattgagcatcagttcgcggatggcggcggatgctgaggacttgcttgtcttcgaggattctgcggccgggaacagagcgtcggcgattagggagatgatacgggaacgtgcatcgccggcattggcattgttgctgctgttgccggcgtcggtagtggcggagttgccaatagtagcggagctgttttgtagagtcgtatccaacgctgtgacaagcggctccaggttgttctttgtcgcctcggcaatgtcatcgagctgatcgaataaggcgaacagccatgcacggcgttgcccctcatcgttgccggtcgcaagcctttcattggtgacgcgcacgagttcatcaatcggtactgctggcgtctttgccggatcgcgatgctcgcggttgtcttcgatatctcccatcagatgctggattttgcactcgtcctgcaatacggtggtctcggcaaatgcggtggcgatggcgtccgcatcgatgaacttgccaccctcggactggaagcgcacgcgcttaggctcgctgtaataatgcgacatgccgaatgtgatgtactgcggcatctcatcctgcagctgtttgaccgccgcggccaccttgcgcatatccgccagatgttggtgcaccacgatgaaagcgagcagtgccttagcgtcggcgagcgtgagcggctggccaatgcgggtgccatgatgctcgtgatgcgcgaacatgttcttcagcgaatcaaacaatcccataatgtcctccttcgaactgggcgaattaactgcatctgccattcacactagtccggaatgtatgagaatcatcgtggaacgccgagagcgaattattgacgctgcacgcagcaacgtgagaactgaaccgacaccaagaacacagggcatacctgcagcatgtcgagcaatgcgatggcattatttgttaagagctcgaaaatatcgcacaggacgtagaagtgcttgtccgaatcatgtatggcaagaaggctctacagtttgcttgtgaacgactccactggctaactggtagagaagtagcggtttggtatgcgcaaacagtgcgatcggcgatgaagatgactgtgaggttgtcatgtgtattcctcagaacgatgagcaagacccatggacttggtgcgtaatagcaaatgtcgtagatgagcatgaggttggtgttgaccatcatattgggcatggaacgaagatattcagtcctggaacaaaagtgtatgtgtcgactgaatggaggacgagcctaaaggatgacggtggaacattgtttgtgattgggaaagcgcgtaagcaatggcgaatggtaggtatgttcattccacgtaatcgactgacgaactttcgagttggacgagtattcgatccacgtgtactgcggcgtatggctaaggattgcaggcaatcagtgccagatccgtctgaatggggttggcgctggtggggcaatgatgaggatgcccaccaaacagtcattaagagggttgaatacttcagtcaagatggattttcgttgccagaagctggggctgaagatgattagaatcaggtgagtaacacgatgctgaagaattctgatgcgtctagtctttcttcttgagggaccttccaccgccaacaccgcgaccaggacggcttgcattccaatcatctattgttcaggtagctaacctttagtagtgccatatatacgtcaggttccggcagcttatatactgatgcgttcttgacgccgaggcgctcgctaacttctttggtgctgagaaacctaagtgccatttgagttcctctcatcttcgtggagatttcagtacgtcggtatattgagcatacctgcatattagcgaggcaaatcctctagtgaattgagatcttgactcactgataggcggttagtgaagcgattctgcggttaagtcgagcttttgcttcgctgagcagtctcagtgaggcaaatcctcgggcggaccgaggcattgctctactaaaaggccgcttagcgaggcttttcctctactaactctctgagttgcttcgctgacgacgattcagcggggtattctcttgacctatccgtgttttcgctctgcaaagtagttctgagcggcggatcgatactcacacagatgtgtacggtgtgctgtcagcgtctttgtagtttcgccggtcggttgcttggtaatccaggataaatcagtcatggttcctcgcttccatgtgaggcggtacacttgggtactgcctctattgagtgcattgataaaggtcagccccgcaagtattgctagtgcttgcggggcatttatgtagcggcagtgccgccgtcgtgcgtagtcagggactgcacctgattaagccgctaaccggcctacgctcaaagattgagtagggctcacaactagcttgcgctagtgttttcttttggcttctcagcctctaacagtttgcgagggttactgaccttgagcgcgtcacataacttgatagccatgccaagactcatattttcgataggtcttgaaccagtctcagtcgcggcgattcgcgtgtgcggcacacctgacttgtcagctagttgacgctgggttaacccgcgcttctgccttaactccctaagactcattacccacctcgcttatgctcagtgggcccgattatacctatcgttgaaacatatgtagagtgaggggcataaatcgaaaggcgtcaatgatgaacggaacattcgagcagttaagagcagccgtgtatggccaagcagtcggtgatgccttgggcgtgccttatgaattcatgccgagagataccttccgatgcgaaggtatgacgggatacggtacgcataaccagccgattggcacatggtcggacgataccagcatgatgctcgccacattggactcgctgatcgccaatgaatggcaagtcaatactgaagatatgcgagagcgatatctggcatggctgagtaatggcgaatacacgattgacggacgagtcttcgattgcgggcgaacggtctccgtcgcgttgcagcagcgtgtgggcttaagcggtgaacgagacaatggcaacggctcactgatgcggatcatgccgttggcgttcgcggatgcttccgcggatgacgtacgtgccgcatctgcaatcacgcacgcccatgcaatctcgatggatgcctgttcgagcatggtggatgtgttgcgcgacggactcatcaaaggcatatggccgcaagagctggatgatgaaccgttacgcggtatgccgcgtgatgaagttggttcgagcggcttcgtcaaagacacgtatgaggcggcgctctggtgcctcgcgaataccgatgattatgcgagttgtgtgctcgccgccgtcaacttgggtgacgatacagacacgaccgccgccgtcgccggatacctggccggcatcaaatatggattcgatgccattcccgctcagtggctggcggtattgcgcggacgtgagcttattgaggatgtgcttggacggacggagtcggcgtggcattaaggcgctcgcggtgagtggcaacctactgtttctgtatgcgatgaagatggccagtacgccaccatcaacagtgaggactccctgcctactgttctccacgatcacgcccaagcactggacgctcccatgtctcgttccgctgaacattgccgagaactcccttcttctggatgcgcatcatcgaatcccacttgctcgacgcccagactgctttggacggggatacgccgctagtgggggacagagattgagacgcattcgggttcgaatagtgtgagggatttggctttgccaacggttgttggacacattccatacggtggtgcctgtgttgttcgcaaaagtatgtctatctaatcgttaatcgaggatgacgatatggtgagtttttctgccgctataatgtaggattattaacaggttacggctgaagaactgattacagtattagaacatttttttctgatatatgtggttggcgtagatgtggcatatgcgagggggcatcctatggcggatgatgaaactcatatcggtcgaaataacgaggaacgcaaggaagacgaaaaccgtcgcattatgggaaaggcgctggaaggtgttgcggcggaaaccgtgcaacgctttggttctgccatcaaggaacatttagcggcctatgcgggtgatagagagaaacctgctgatgagaattccagacctcctaagaccttgaagtccattgctaagatggagactagcaatgaattcaaaaagcagaatctagctcagcaagcgggttttagtgccgaggttgaggcggtagccaggaagaacgccgataacatcattgctggcaacgatacgcgattcaaacgatatgatgacgtgaagcatccagatggacggcaagtgtcgaacgaccccatcgtggacattgtcgaagtggatgacttgggcaaaccaatcatcggctctgaggctcaaatgaagttcgtcggcagtagcccgaaaaagcttcttgataagttgaaaagcaagaaatatgcaaaatatcgtgatgcagacgtcagcatggttattccggatgattattacgatgtactgatgggtgatgggcctgacggcatcaacgaacagatacgaaaacttcagggcgagctggatggaggtcggcttgccggcaagaattctgaggctattcagcagcaaatcgatgatctgaaacagattaagaaaagcctgcggaaaagtggactcaccaagcgagaagcgttgtatgcgcgagaacatcccagacgcatggtggcgaaagatgtagccaaagttgccaataaagccgggttgcagcaggcaaggaatggtgcgctgattggtggtggtgtttctctgattcgaaatatggttgcctgcattaatggctctattgagccagcggaggcagcgagaaacgtcggcgtcgatgcaggcttggctgcggcgttcggctatgtcaccgctttttccggcgctgccattaagggtgccatgcaaaacgcgtcgagcgagtatctgcgtagtctatcgagaacgaacgttgcagctacgatggtctccactgtaacggatgtttccaaggtggttgcactgtattgccgcggcgagattactggagctgtttgtatagagcgcctcggccagcagggaatggggcagctcggaggagtgatgggcgttgccgtggcgatggccgcaatacctgcagatggtgcttttatggctgcgatggttggtatggctggaagcaccttgggatatgctgcagctgttgccgtatatgaggaattatccactgctctgcatgactatgagctggcgaaagaggagcgtattcgtgtggaacgcgaatgtgcggaagcggtggagctcatccgccaatataggcgtgatatgtctagggatgtcgagaattatctggcgactcatgatgaattgtttaatagagcattcgatgcaatggatcaagcgttgatttccaatgatattgatggatatttgaccggaaacgccgaaattcaagaatccttgggatacttgccaaggtttcggactcagcaggagtttgatgatttgatggcgtcagacgacaatttcgttttataaggaggagccagttaatgaagtacatcaaaacacgtgatgcattacaagcattttattatctgattgctgtcgatggatcagtccgtgacgacgaacgcgcactattcgatcatataggtgacaatttggatgcaaagcacttccatgattatcgcaaagagattatcgattcgtgcgatgagcgtataaaccagtgccacgattccgatgatcgctacgacgtaattgttgagggtgttgatgcagtcttgtcgcatcgaacggataaaagagctgcaggaattgcaccaaggctgcttctgtggaatatgttgtcagttgccttcgctgatggggaatatgatgcagtagaaagcagactcatcagacatattgcccggacgatgattgccgatcgttccatataccccgaaatggaacatcttatgcgcgcggcgtatgacgtgcgaggcgagctcgactggatcagcaattccgaactgccatatagtgaagttcgccccatggtggatcagctggaagagcgcgtgaatgttctccaaaacgctgccgtgttgctgattgaagacgagacggccgcgccagccccggaagtcatggttccagagaaggacgtgtttgatcagaccaaggatgccgttgactcggtggtcgctccggttgtggatcaggttcagcagggtgctcagggagccgcggatgcggtgaagcatacgtttgacgataatgttgctcctgttctcaaccaagttggcgatgcgctgaagccggtgaatgatgcagtgctgaaaccggtaggcaacgcagccaatgaggttgcgaaacgtgcgggtgacgcagccaatgaggttgcgaaacatgcgggtgacgcagtcaatgaggctgcaaaacgtgcgggcgatgcggcccatgctgtacaaggcttcttcggtggcctctttggacgcaaataagagaaacccaggaaggaattcactatgccattttttgttgttccactattcatcggaatggccgctgctgccggtaccgcaggcgtgggtatggctgccaaaggtagtcttgatcagcacacggcgaatcagcttaacgacaattccggagcacgcattcgatgggcagctaataacctcgaaaagcttcgtgggcaatgttcagattccctgaatgccttgggcaaagagaaagtcattattttggatgggagcgttcagcgcttccttgatgcttttcaacagctgaaaaatgttgatttcaccgcgtccgaagggcttgatgaactcaataaactgcgcatagacaaagcggcttttgctgaacttaaaaccatgggaaacatagcttcgtctttgctggaaggtggtgtgaccggtgcggccagcggtgcattggctgcgtttggtgcatatagtgccgcgtcggcacttgccacggcttccacaggaactgcgatcagtgcattaagtggtgtggctgcttccaacgccacgttggcgttcttcgggggagggtctttggctgcaggtggcttgggcatggccggtggcgccgctgtacttggaggtttagttgcaggtcctgcattgctggtcatgggcgttatcatcggtgccaagggtggcaaaaaccttgaggaagcgaagacccagtctgctgaggcaagcaagtattgtgagcagatgatggccggtgcggaccagtgcgttgccattcgtcggcgcagttatatgttccacgctttgcttgcccgtcttgatgctaaattcctgccttcaattcttgaaatggaaaatatcataaagaccgagggaacggattattcgcaattccgtcaggaaagtaagaagactattgccgcagctgcgtccactgcagcatcaatcaaggccgtgctagatactcctctgctggccgaggatgggtcacttactttggagtcggagaagctgatgaagaacagtggcatttgatgggatgaggattccggagctggactgatggttctgtgtcttcttccgtcatttttcatggcttcatatagatacgacgcatgacgaattctaccaggcgatctgggaggaagcgcttgagttgtatcagggccttgtagctgctgccgacggcgatgcgcaccggaggattgcgtttgccgagcgtcgcgacgatgactcgggccacgctttccggaccgtcaccggtctgctcgtcatgagccatttgcccgactgaacgttggcattcgtcgtagtacggtgaattggctggttcggcgaggatacgcgagccggtgaatccagtggataggtcacccggttcgatgattgtggcggtgatgccatgacggcgcccctccaaccgcagcgcctccacatacatttccagcgcagcctttgtggaagagtagtgcgattggaacggcaaacccagccgtcctccaatcgagccgacaacgatgactcgtccccgcttacggttgcgtgccgcggtacggcgcagcaacggcagtgcgatttcgttgacctgcaacacgccaaaataattcacatcgaactgcttgcgagcgagcgtcattggtgtgcattccgcagagccggcgatgccgaatcccgcgcaatggacgatagcgtccaatcgggggagagcgccgagaatgcgcgtgatgtcagacggcttggtgacgtccatttcgtaggtaaacagttcgcctcggccaagacgctgagtctcaggaacgctcccgtctgcattaagtcccaccgcaattacacgccagccttgcgcagcgagcatcctcgcagttgccttgccgataccactcgtgcctccggtgaccaatgccaccggccggccatcatccttgattggttccatgtgtactattatcgcgcggtggtggtgtcggaatcacggtatggtgatagcagccgcatggaacaagctacatgctaggcgaagcttgagcgtcgtcatccgtcttgcgagcattcagatgccggtgctcgtattcctcgaagtcatcacggacggctgccgcgggatacttgctcttggtctttgcgagcttgcccatgacgatgtcatccatatccacgccaagcgcatcggccatcatgatgcaatacgtaagcacatccgctagttcttccctgacatgtccttcatccacggatggcgactgcggcgtccactggtagcattccagcaattccgacgcctcgatgctgatggacttcgccaggttctcaggagtgtggtattggccccagccacgctccgccacaaaatcacgaatcgactgaatggtgctgtcactgatcatgactgacattctaggacttgctgaatgttggtcatgtaccagagctcatgatggaccataatatgactatgaacagtgagagcttggcgccgtttgtcatcaacctgccatatggccaatacagtagggaagcttttgaaaaggcttttgacgaatccctcgagaagcagatggggcgcagtgttaatgattccgagctggaacatttcatgctgcgatatgtgttggcatatccaacggtttatgtcgtgtattcaggaaagaccaatcgctattcgatgaagaacgaatatacggtgtacgtcggtgagaccaacgatatacggcatcgtacattccagcatcttgaaagagatgctaaagaacgcgaggactggaaagctgtagctgatgctgtctcgcggaatgatgatgcatatcggcaatatgttattgcacatcccaaattcaataagtcgttaaccctagatgtcgaaaaccgtcttatgcactatatgtccagtaccgattcggtgaaaaggctcaacaatcgacggaccaatgcgcaaggcgattattacaccgcagaccagtttgatcggattttctcgcaaatctggttgagattacacaaggaagattctgacctgttcccggcggaggagatcatccgagattccgcgttgttcaaggcatcgccttttcataaactcagcgatagccagctcgaagccgaagaatctattttggtgcaacttgccgccttggttgccgatagccggcaacagaagaaagccgatgagcaatctttagaccgccatccgaaattaatctttgttcaaggtgctgcaggtacaggcaaaacggtcctgttaagccacctgttctacagaatcgcgactgaaatcggcatccaaggcgacacctattccgaagacgaagattatcctgagctgccacaaacggcgaatggccggctttcctcatacattcttgtcaatcataaggaacaggtgcacgtatataatcagattgccacgaaactgggtttgcagaagaaatctgatgaagtggtcatgctgcccagtcggttcatcaatcgattcagcttacgcaacgagcatggtcgaggcattccagaccagccgcaaggcctggcggacatcgtgctcatcgacgaggcccatttgttgatgacgcaaggaaatcagggatattccgggaagaaccagctgtatgacattctgcgcagagcccgggtagtgattgcggtctttgatcacaatcagattatgcagtccagccagcagtgggacccagcggtgctggaaaaacttcagctggactctgattcgactcagaccgcatgtgcgaccgggaaaatcggcgcattcaaagcggttgatttgggcgccgaatatcatctgccgtccatttccgtggacgttgcgcatgtccatttgaaaaagcaattccgtattgccgcgagtaagtcgatgattcagtggattgaccgattcgcttcggggaaaggtatcggtcctttgcccgttgatacgggcgagtatgccgcagatggtgaagtgattcgagaaccttatgacgttaaggtgttcgactcgccggttgatttgtttaatgccattcacgcgaaggcccagctgaagcccgatggttgggatggggctggactgtcccgtttgttggccacctatgactggaagtattcggcgaaatctgagaatcagaatgatccgcatggcttttggaatgtggaactgcatcgcgatacttccggcgtatggcgtatgggacttgcggaggaccatggattcgatcattccgcaataagttctgaccaattctgcaagccttggaactatcagctcgaagattccgctccgaaaagcaggaaaggcatcgacaaagaactggcttgggcggagaagccgtacaccatagatgagattggctccatcttcaccatccaagggtttgatttgaactatgccggtgtgattattggaccctcggtgacgtatcgtaacgggggaatcgtgttcgatgcaaaggccagccaaaactatctggcaaccaataagcgcaaagatttaggagattttgccgaagaaaatttgaagcatgagttgaatgtcctgctcaagcgcggcgtccacggtctgtaccttttcgcggtggacgaaggcctgcagcagcgtttgaaggagtgctgcatccattaaggtatgtgacggaattattgtgctgaaaatgcacgcgaagcgcacgcaaatgatgttgaatgcgctgaaaatgcgctcaacatgctgggtgtcgtcgttcgctatgccaaaggcaggggattcctcatggatgagcatttggccaaggtctgggtttgcagccagctgaccaatatcatcaggaatctcagcgaagaacaggctggcatttctctgcatagtcaatggatatgtgccgaatgccgtaccgcgttgccactgtcgcccctacaacgcaaacgccagctcctcccgcaacgcagtacgattcggataacgcccgacgatctcgtgtgccagcacacgggtctcctcatcgccgaacactgcggcgaaacgacgcagctgtttggcgatctgctggtatgtggtgcggcgtgccgtcaatgtattgtcgacgccacgttccactgtaaaccggaacacgggcgtgcccatggtgccgtatggcatcgcgtcgaggattatcgattttgctgattcggggtgttcgatggcgatggtgcgcagcaacggtagcggcgggtaatcgaccatgacgcaatagatcagggccgcgcccgaaagccgctcatccacgatgagcttctcataagcgggattgcgccagctactgtgacgctgtgtaccgcccttggtggtcatttccggctggtacttgatacggtcgatgatgttccgggcgcaatctctggccagcccatcagccacgtcatgccattcttctgcgctaagaccgccgtagatgcgtaacagattgcgtagtttactcacgtaatgggtatcggatctgtcgttgcaggaaagaatgtagtaccgatacacgttggcgagcaggccaacgtcattgagtccctcggcgcagcattccatgatggtatgccatccatggggcagcagatccggcagcagaccgttatgccgggcatcgatatcgacatcttccatatcccggctcgacagaaggaaaccttgtgcgagcatgtatgcggaacgcaaatgcccttcatgaatcatgttcgcagcgttcatcagtgtgagggccattgactccgagtattcgctcagaagctgctcgcgtccagcgtcatcgttggatagagcgtataggtcgtagacgctcatgagtgtgaacaactgcaatacgtgcaacgattcatccgaaatgaagtcggtttcgtcgtctacttcgctcgaatcctcgttatcctcgtcctcgtcgtcctcgtcgctttcttcgctctcttcgctgaacgagtattccagattacgcgttatcgcgttgtcgatcacgtcataggcccacatgcgtttgtcatcatattgggcgaaagcgagcgcgctggaaatcagcaacatactgttcaatggttcgcattgccgcatgtccttgtcgttcgcggcctgcgcaatggtgttcaatgccttgccggctgtaggggagtcggcgaattccgccacattctccatatagcatcgcacgcgcatcgccagatcatccataagcgtgagcaaaggttcggagccatcgtcgtcctcggacgagagcagaagcgcgtggacttcgtgtatgcacagtcgcaggttgccgcatgcgctcgcgtaatcactggattgcagggcattgcccgcgatagcctgcacggttttgatgaattctgtgtagtcacaggatttgctgtacgcatcgctgtgcttactgatatgaataatgaaacgttcatggcatcggcggattgtgtcggagagcatggtttgtgcgtcgatcagcgggattagcggtcgttcttcgtctggctgggcgcagaaagtctttgcggcttcgcgcagctgggcggaccacaggaacagcagatggcctttgccttgctctgcgcgcgcgtcgaggtgttgctggatggaatccagcacggtgcgggggagtgcgatgacgccatcgtgagcgttggcggtgtcatcattgtggtgattgccgtgcgcgccaatgagctgtttgcgcagttcgtaaagcacggcacctatgtgcttgcaatatggtgttctctgatacgggcaggtgcacgcggcggattgtatgcgaatcgaattgtcgtcggttgtggattcgtggtcggtgttactgctggtagtggcttggtcatcggtgtttgcttcattggtgttctcgccgtgagcgtctttgccgaggcggatgtcaacgtcgtaatagtcatcgtcgctgccggccacccgcgcgtgatacagctgcggcgcgatctcctgcaccgaactcactcggcctgattcccagtaatcggtggcgcgttcgagaatcagcggcgtgccttcgaacatgacctcgaattgagccaacgctggcttttgcggaacaaccatactgctgattgtagcgggtggagtgttactcgccgctaatgcctatcctgtgacgtaagtgatatcatgagctttgaagccggccgcctgcgggtggtttggaagtgaaagccggtgaccctgtgccatcataggggcccggctttcgcgtatacaccttattgaaaactaacaagcgataatttcatcgagaacgttttcccgaagaaattcagaaaaatctaattttccagttttggtatctccataagcgccgagaacttggtctggaatccatagacaaggctccgctgaaccgcgtatatgatccattcggattgttctgacaagatgcctggtacgcatctgtgcaagatgttcaaggtcgcgttggtcttgaggaggagtgcgactttctaacaccaaagtactgacctcatatgactctagaacaggtaacaaccgttctaaacacttacggcgtgctctttcgtccttgtggacagatgattcggccttttctgagggcgcgaatcagattcgtaatgcagtggtttgccctggactctgttacggtgataataacttcatcgttgataagggagtcttcatggcaggcaatggcaacacggcatttcgtttccgagtcgccttgcgccttgacgggcgcgaatgctggcgggagattctggtgccggcatcattgacgttcttcgatttgcatgcggtattgcaggaatgctttacgtggcacggcgagcatctgttctgcttctgtgccacattcccggatgggaagcaggtgcaagtggaagaattgtggggagaagagccctcataccatgaggcgaactacgaacaatatatgccggtggagccgttgccggaagttcgcattgcttcggaaaccgagctgggcgacgtgtttcccaaggcgcgtaccgctcgctattactacgattatggtgacgattggatccatgacatcaagctgctgcgtacctaccgcagcgtgcacgttgcggatcctcagctttgggatggggcgggggatgctcctccggaggatgtcggcggggtgtatgggttcgagcggttccttgataccttgggcaatcccgaagatgaagaacatgatggcatggttgagtgggccgaggaccagatgtgggatcgtttcacgctgaaccgccatcgtgagcgtctgttccgttggcgcaagcaccgtgacatgatgttgcagtagatggcgtggctacaatatgagcagctgtcagcggaatagccgtttgtggcttgcgggctaggggctgaaaatgctataaatatattgctttactcggaaacgagaaaggctccaagtcgccggggggctcccccggcattttttgtcaacggggacgggggatgcgatgccgtctgtattgagcatcttcgctgatgagagcggtgagtggggtaaacgatcagaatattatttaattactcttgtctttcatgaccagtctaaggacattagtcttgccttagagcggtaccgccagtcgttggctgactatggacttcctgatgtccctttccatgctgggccgctgcttaccgggcatgatgcttacgaagggatgagcctatcggagcgtaagaggcttctgggtttattcgttatcatgactcggcggctgccgattacatatcggacgtttgtacatcgtaaaagtgattttgacgataaccgccaacgttttgaagcgcaactcaaacgcgatattgttaatctacttttggcgcatctttcggatttccattcttatggcactgtcaaggtgtattacgacggtggccaacagatagttactgatgccctgcgaggcgggattgagtatgcactctccaaagatgccattgtctatcgtgacgcttctccacgcgactaccggcttgaacaagttgcggattttctatgcacccttgaattgacctgtgagaaattccggaatggggaacaaactgaaacggacaacaagttttttggtgattggaaatccttcagagtcaattatcttaagccgatccgcaggaaaagattggaatcataaatttggcagtgcctatatatattcgggacacaattgaataacacgaaatagcaaacaaaatccccggacctacacaatcatcgccacgacaatctcagaaaacaccgttacggcaatcagtggtgtggtgccgtcgatgaaggcgggcatgggtggcagatggtagtaggcgaggtagcaggccatgtcggcgataagcaaaatcagcaggatgatggccaaaacgatggcagcggttgccccgagagctccggaactgtgcaacatggtcagcgcacatagttccagcgtgatccacatgacgatgagcaacagttccgtggtgatcggccgttgcaacagtagcgaagtaagcacggccagaatggtataggcggcaacgccaccgaccgcgaaccgctgaatccgccgatttcgccggccctattaagtccctcaactccatcaatcgccgtctgacccatcacatcacgctttcatacacattgccgattgacagtcctagaacacagtctagaactgtcatggcatgttcacgcagataggggctccaacaaaattggctaaaagagaacttggcaacctataacaaggacgcgcccgtgtgcccttaccgttcagctccgctcacgaatgaaatcgaagatcacgtcgaagacctgctggctccagaaatcgtactcatgttcggcgccgtcgactagcaccagctgcgcgtccacaccgtgttcgaccagccggtcgcgcatcttgacggattgatgataggggaccacggtgtcggcggtgccgtgcaacaggagcatcggcggatactgttggtcatcccgcacctgcaggtaggggctcatgtcagccgcgcgctgacggacctcggcattgatgccggtctcatgggtcgcgcccaccacggccgcgaacgggccgaaataatacagccggaatggattggtctcatcgtcgaatgcgtcgactgcttcaagcatgtcggtgggcgggaagcagctgaccacgtacttcaccgcatcgctttcatcggcattggtgccgtcctcataccgcggatcgtcggcggtcaaccccaccagcagcgacgtgttgccgccggacgacgtgccccagatgccgagacggtcggggtccacgtgccattgacgcgcgtttgccctgagatagcggatggctgctttgacgtcctcgagatatgcggggaacatgtcgtggggggggtcgctcgaggcatcgcgatgattcaccgtagccaccacaaagccttcgcgggccaaagccgagagctgcggaatctcgtagtcgcgatgcggcgtggtccaggcgctgccttgcacgaataccacggtggggtagcggcggtcatcgtcatcgccggtggattgtggtgagatgatatccatcaccaggttatcggccccggttttgtacgccacgttgcgggtcagcgtggccaacccggtaagcgtgggattgtgcgggatatggatgacattgtttgcgccggcgttggcatcactgactttggctgaatcggtagtgttcatggaatccccctagctttgttgctatagaggtcatcatacaagaaataggcatgattacggcacaacgatgtctcggtcacagcgaagacataaagacgcgaagacgcgcccggcagcgcgcgctgcctgcctgcgagttgccttcaagtgcacttcaagcgataaggtgacataagccgcggcaatggagattgctgcccggcaacgaggcggacagtgcccgttcgccgattcacgataacagaaatgagacactatgaagactcaggaaatcggacaatccggcatgattgcgtcacgagtggcgctgggtgtgatgcgcatggacgcgctggatgccgccgatgcggcacgtaccgtggccgtggcccatgattctggcatcgactatttcgacacggcggacatctatggattccatgatcatgccgcgcacgccagttcgaagcgtttcggccaagcgtggaaggacgcaggactcgaccgcagcaccatcttcatccaaaccaagttcggcatcgactacagtttcggcgaaaacgatggcggcgccaacggatatgacttcagcgccaagcatctgattgacgcactcgatcacgagcttgaggctttgcagacggattacgtcgacgccgtgctgctgcaccgtattgacacgctgtttgagttgaacgaggtcgccgaagcattcgacgcgttggaatcaagcggtaaagtgcgtcatttcggagtcagcaatatgggcccgtggcagatcgaactattgcaaagcggccttcgtcagaaattggaaatcaaccaactgcagttcggcctgatgcatacgcagatgctcgacgctgaaatccaattcaatatggcgagcgatcccgcagccgatcgcaccggtggcatcctgccttattcacggctgaagcatatgaccattcaggcatggtgcccattccaatccggcacggaatacggtccgttcgtcggcaacgagcatttccccgagctgaacgccgaattgacccgtcttgccggcaaatacggttccacgtccaacggcattgccgtcgcttggattctgcgtcatcccgccggtatccagccgttgctcggctcaatgacaccggagcgcatccgccagatggcggccggtgccgatatcgaactcgaacgccgtgactggtggtcgctgtatcaggcagccggcaatccgttggtgtgagcgggagatgccgagattactgccgttgaggcgcgcgcttagcgtgcatacatctcaacggcagtcaatgctgtgccaatccacccacgacgagaacaacgacacgaacattccgcgaatcacatcagaacgacggcatatcgagcgagggaactgaatcatcggccttactggtcccgttcgcgggcgagccgacatcgtgattgtggaaccactcgacaacccgtgtttcactcaccggcatcaaatcccaagcatccaagccaacattcagtgcctccgggcgtgcaccaccgagtccctcaatctcaaccgtatcgtgcggctccaaactttcgaacaggttaagtgcggggcggtcttccagccaccagtcgtgaaatacctcatgacagtcgccttcccctttcggcgtgcagcaatcgtttcccatcctaggcgcagccggcacctgtcggttcgtgttgccataatgaggcgcattgcaggggaaccagtgaacgcaagctgccagccatcgtggcggcgaacgggttgagaaaggcgctgtgcctgacccttggaacctgttggacaacaccatcgaagggagcaaacgatgtcttttgacgccgccgcattcggcccgatcaccctgaaccacctgccgccgttcgcccagcgcctacgacatgcagtacacgtggaaacccgaatgggacgtgtgaggcgcacgatggatgagcggtgggcgcgtgctttgcgtgccaagggcattgatattgacgaggctgacggtgctggtgggaaacgggcacacgacgacaaacggcatatcgacatcacgggtactggtcgacgccccgagtcccagccggctgccgggctccgctgtcgatccaataccagtacgaatctgccggggccgaaggtgacggcacgcgccacgccattcaaggccaccggtcataagggcggcatcagccggcaggggaattgagctgatcgcagaaccatcgcgcgatgaatgggcgcggccaacgccattccgccattgttgagccgcttctacttggaccggtacctctttgaatggagatatcattccgcaaaaggtcgaatgtacctctttgaacggagatattccatattgaagctatttcggcatcatatggcacgtaggaaatcccggatatcggcgatttcctcatcacagatggcatgggccatgccggaatactcgcgataggtcagatgcccggcccgttcaaggacctgatgggccgtttgctggtcgggcagcggaatcgtgcggtcctgcgcgccatacgccaggaagaattgggtaggggagtcaagcgccgcctgttcctcgcccatgaacgaaggactgagcaggatcgcggcatcgaacaacgtcggatgcgccttggccagacgatacgacagataaccgccttgggagaaaccgatcaatatcttcctgcgatgggcgaatgccgaggcatccagcagtgaagccaccgcatacccgaccgccgcgcattcgcgttggcgctcgtccacgccgcagccgtcgggataccagtaattgccgcccatatagggcctcgcgtaggtggcacggaacgagatatagctgggtgcggcgtcaattgcggccggggccgcatcggctcgcgccggcgcatatacggcgtcgagaatccgcatcatctcgctttcgtcgttgccgtaaccgtggaacatcaggaaaatggggtcattgccgccggcatcaatctggcttgtcatctgcattcgcatcgtcatcacctcaccagcgagcttacatgcattagacttgtagcgattgacccaccgagcacgcaaggagcaagttatggagccgaggcgcgggcctctcaccgcaggcgagaaagtgcagttcaccgaccgcaagggcaagaagatcaccggtcagcttgtggccggcggctccacgcagaccgagcatggcctgattctgcatgacgatgtgatcggcaagaccgaaggcaccgtgatcctcaccgtgcatgccaagcgcgaggcacaggtcaatcaggtctaccccgagaaagacaagaacaagccgtggaaatcgtcgcgcgccatcggcggctgggagtatgcggtgatgcgccctcgactggccgattatgtgctgtcgatgccgcgcggcgcgcagatcatgtatccgaaggacatcgcccaagttattcagctcggcgacatccgctccggcatgcgcgtgctcgaatccggcgccggctcgggtgcgatgagcgtgaacctgctggacgccgtgggcgagcgcggccacctgaccacgatcgagctgcgccccgaattcgccaaggttgcccaagccaacgccacgctgtactacggcgaggcccccagctggtgggacctcaaaaccggcgacttcgattccgttgccgccgaactgcctgagcattggttcgatcgcatcatgctcgacatgctcgacccgtggaacagactcgagcaggcataccgcgtgattgcccccggcggcgtgttggtcagttacgtaactaccaccacgcagatgagccgcatggccgaagccctgcgcgcggccggctgctggaccgagccgcagatccaggaatcgttcgaacgcacatggaaggcccagggcctcgccgtacgccccgaccaccagatgatcggccataccggtttccttgttatctcgcgcgccatggcctccgggttcgaggcgctcagaaagcgcgatcgcgtgaccaaggacacacagaccgacatcgactcgctcaccgacgaacagcgtgaggcgcagatcgaggaactggaactgcgcgacatctccgaccacaaactacgtaaggtgttgcgcgacctcgatcgtcaggtgggggaacttggcaacacgcacgaatgaccgccaaacgatgagtttgtgaacgctcacacacctctatactggaagcaacaccacaccgccacaccgccacaccgggcagacggttcgtgaagggagccacggatgggcatcaagctgagtaaagtcgccaaaacagcgaagaaatacgaccatatcctcatcatcatgaggcacgccaaggccgagccgttcggcgacaagggcgactcggagcgcgagctcaccgacaaaggtctgaaacaggcgaaggccgtgggcaagggcatcgagtcgctgggactggtgcccgaccaaatctcctgctcgtccgttacccgcacacgccagacactggaccgcatgctcaagacttttggcgacaagccgatcgtcgactaccgcatcagcctgtatgacgggggagtgcaggcggtgttcgacgagctcgcccacgtcaaggccaagaaccgcgtgttcatgatcgtgggccacgagccgactgtgtcgatcagcgcccaatggctcgcctccgccgactccgacggcgaacgactcgacctgctgaatttgggactttcgcccgcgtccatcgtgatcatgggatcgaacaaaccgttcgacgaatggcaggtgcacagcggcgaactgctcgcggtcatcaatgtgaaagacttcgactaaagcggatataaattccatctataacgacactctacggccatttataagggccggaatccggatgttttgctaccctaagtcgggttacgaacgcatacattggaggattcatgtccactctgacttccgtctccggcttcccccgcatcgggcagaaccgcgaactgaagaagatcatcgaaggctactggaagggcgccaacgacctggccatcgtcaaggccaccgccgccgaactgcgcgccaagcactggaagctgcagcaggccgccggcatcgacctcattcccagcaacgacttcagctactacgatcagatgctggacaccgccatcctcctcaacgtgattccgaagcgttacgagcgtctcgccttcgataaccaggaggacacgctcttcgccatggcccgcggctaccagggcgacaagggcgacgtgaccgcactgccgatgaagaagtggttcaccaccaactaccactatctggtgcccgaagtcgagtcggccgcggagatcaagctcaactccaccaagccgttcgacgagttcaacgaggccaaggcgctgggcatcgacaccaagcccgtgttcatcggcccgtacacgttcctcaagctcgcccgcaccccggaagccaccgaactcgagctcgacaagggcctggtcaacgccgtggccgccgtctacgtcgaagtgctcgccaaattcaacgaactcggtgccgcatgggtccagcttgatgagccgtacctcgtgctcgacaaggagccgggcgatgttgaactcttcaagaccctgtacaccaagatcctgtccgccaagggcaacgtcaaggtgctgctcaacacctacttcggccacatcgccgacgtgtacgagaccgtcaacctgctcggcttcgacggcatcggcctggacctcaacgaaggccgcgaggagaacctcgaagccgtcgccaagtacggcgtggcctccaacaccaccatcttcgccggcgtgatcaacggccgcaacatctggcgcaacaactacgccacctccctcggcctggtcgacgccctgaagcaggtcaccgccaacgtggccgtctccaccgcatcctccctgctgcacgtgccgttcagcaccgaaggcgagaccggcatcccggccgaagacctcaagcacttcgcgttcgccgtccagaagctcgacgagctcaaggaagtcgccgccctggccgacgccaccgaggacgagaagaaagtctccgccgccctcgccgccaaccaggctctgttcgacggcacccgcgtggccgccgacccggccgtcgccgagcgcatcggcaagctgtccgacgccgactacgtgcgtcagcctgcccgcgaggagcgtcaggccctgcagcgcgaggccctcggcctgccgctgctgccgaccaccaccatcggctccttcccccagaccaaggagattcgcgccgagcgcgccaagctgcgcaagggcgaggtcaccaaggaagcctacgacgagttcatcaaggcccagatcgacgccgtcatcaagaagcaggaggatatcggcctcgacgtgctggtccacggcgagttcgagcgtaacgacatggtcgaatatttcggccagaacctcaacggcttcctgttcaccaagaacgcttgggttcagtcctacggcacccgttgcgtcaagcccccgatcgtctggggtgacgtgtcccgcgccaacccgatcaccgtggaatggtccgcgtacgcccagtccaagaccgaccatgtaatgaagggcatgctcaccggcccggtgaccatcctcaactggtcctggccgcgcgaggacatcacccacgaggagcagaccaagcagctcgccctcgccatccgcgacgaagtgctcgatctcgaggccgccggcatcaaggtcatccagatcgatgaggccgccctgcgtgagaagctgccgctgcgcaagtccgactggcacgtcaagtacctcgactgggccgttccggccttccgtctggtgcactccgccgtcaagccgaccacccagatccacacccacatgtgctactccgagttcaacgacatcatccgcgacatcgacgcgatggatgctgacgtgatctccttcgaagcctcccgtggcgatctggtggtgctcgacgccattcatgacgcgcacttcgagaccgaggccggcccgggcgtctacgacatccactccccgcgtattccttccgagaaggaaatcgaggatcgtatctacgagatccttgacaagatggacgtcaagaaggtgtggatcaaccccgactgcggtctgaagacccgtggtaacgccgagacctggccgagcctggagaacctggtcgccgccgccaaggccgtgcgcgccaagctcgacaagtagcggaaatcaccgagctccctctgtatgagggagctcgggtttatgtaaggaaatcagcatgcattccccgatgttcacccttgaggtctttcccccgaagcgcaacgctcccgtggacaccatctatgacaccctcgacggcctggaggggctgaaccccgacttcatttccgtgacctacggccacggcacccattcggatcgcaccgccaccgcgcgcattgctcatacgatcagcaaggagtacggcattcccgcagtcgcgcatctgaccgcgttgtattccgacaaggcgaaaatcgacgaggccctcgacatgttcgagcaggccggcgtgagcgccgtactcgcattgcgcggcgactacatcgacggcgagcagctggtaggcgagttcaaccacgccagcgacctcgtgtcatacatccgctccgtgaagccgggcctcaaagtgttcggcgcctgctacccggaaggccactaccaggctgactcgctggaccaggacatcgaaaaccttaagatcaaggtcgatgccggcgtcactcacctgatctcccaactgttctacgacaatgaggacttctaccgcttcctcgacaaggcgcgcgccgccggcatcaccgtgccgatcgaggcgggcatcatgccggtgcgtggtgccaagtccgtgcgtcgcatggccgaacgcaacgcctcgcgtatcccggacaagctcaacaccctgctgaacaagtgggaggacgacatccagtccctgcgtgccgccggcatcctctacgcttccgagcagatcgccgacctcgtggcccacggcgtggacggcgtccacctgtattcgatgaaccaccccgccaccacgcgccgtatctggcgcaatgcggaaccgttgttcctcggtacgcaaggttgacgcatatcgcagcgcggcgcatctcaatgcgtcgcgccgcacgttaatctgctggcgaaacccagagttcccccagcggccgatggatatcatgaacgtacaagccaaccaaagcgatggaaggaagtccgttatgtgcactggtgtccgtttctccgatgatgagggcaacacctatttcggccgtaatctcgactggagtttctcatatggggagaccatcctggtcactccgcgcggctaccgctatgacacggtgttcggtgcgggcggcaaagcgaagccgaacgcggtgatcggcgtgggcgtggtcatggccgataggccgatgtatttcgactgcgccaatgaacatggtctggccatcgccggcttgaatttccccggctacgcctcgttcgtccacgaaccggtcgaaggcacggaaaacgtcgccacgttcgaatttccgctgtgggtggcgcgtaatttcgactccgtcgacgaggtcgagaaggcgctcaggaacgtgacgctcgtctcccagatcgtgccgggacagcaggagtctctgctgcactggttcatcggcgacggcaagcgcagcatcgtcgtcgagcagatggccgatggcatgcacgtgcatcatgatgacgttgatgtgctgaccaatcagccgacgttcgacttccatatggaaaatctgcgcaactacatgtgcgtcagcaacgagatggccgaaccgacttcatggggcaaggcctccttgaccgcctggggtgcgggtgtgggcatgcatggcatcccgggcgacgtgagttccccgtcgcgcttcgttcgtgtggcctacaccaacgcgcattacccgcagcagaacgatgaagccgccaatgtgtctcgcctgttccacaccctcggctccgtgcagatggtggacggcatggcgaagatgggcgacggccagttcgaacgcacgctgttcaccagcggatattcgtccaagaccaacacctattacatgaacacctatgatgaccccgccatccgttcctacgccatggccgattacgatatggattcctcggagctcatcagcgtcgcccgatgactccttcccggctcatgccccattcggagggcatgagcgtatatagtggaatcttatggaatcgtcgatgttcaaacccagctccatggatctcatcagggcaggtctgcaagacctcgacaaggcccgcaccttgttcgaccagctcaagacggacgacattcccgatgagcgatgcgccgaactgctgagcatgctggcccacgcctgcgaccccgatatggcattgagcaatttcgtggatatcgtcaacgcgatgcaatccagccagcgcgatctgaaacacgtcatccccgacaacgacgccctgaagcgtctggtcacggtgctcggcgtctccgacgcgatgggcaagttcatgcgcttcaagccgcagcttgtggaggccgcagcagtcgacaactgcaacagccatctgttcaatcacgcgcaacgccgtgcacgtctgctcaaggcggtcggcgcggacccggacgaaccggccatgcccatcgcctccaaggatctggccgaagcggccacggccttgcgttccagctaccggaaccaactggccgccatcatcgcccaggatgccgtggcggacgacccggcctccatccaaccgaccatcagccgcgaactgtccgacctcgcggacgcggcgctcgaaggcgcgctggccatcgcccgccacgaaaccgagggcagcgagcacgtgcgcttcaccatcatcggcatgggcaaactcggcgcacaggaactgaactacgtctccgacgtggacctcatctacgtggtcgaaccggccgacaaggacgtggaccatcagacgctgatccgcgtgggcaccaagatgggcaccatgctgcagcgcgtctgccagtccgccatcatgggcgtggccgagcagccgctgtggcagatcgacggcggcctgcgcccggaaggcaaggacggcgcgctggtgcgcgtgctctcctcgcacaagaactactacgagcagtgggccgagaactgggagttccaggcgttgctcaaggcccgcccggtggctggcgaccccgacctcggccgggcctacatggatatgactcggccgttcgtgtggagcgcgtccaagcgtaagaacttcgtctacgactgccagaaaatgcgcaagcgcgtggaagatctgattcccgcacctctgaaggatcgcgaaatcaagctcggccgcggtggtctgcgcgatgtggaattcaccgtgcagatgcttcagcttgtgcacggccgtaccgatgaatcgctgcgcaccagcaacacgctcgactcgctgcagcgcctgtccgaaggcggctacgtctcgcgcaaacaggccgtgcgcatgtcccaggactaccgcttcgagcgcgtgatggagcatcgccagcagatctggtccctgaagcgcacgcacctgttcccggacctcggccgggcctcggtcggaggcctcgaaaagaagcgcgacatcgacgtggatgagctcaaccagaaccaggagctgcgtcgcctcgcccgcgcattcggcctgcacccggaagaactcgtcgacaaatacgacgacatccgtcgcgaagtacgccacctgcacctcgacatctactatcgcccgatgctgccggtcaacgcccagatggagaacgaccagatcgtgctgagcgtcgaggccgcacaggaacgattcgaatccatcggcttcggcgacccggacgccgccatccgccacgtgcaggcgctcactgccggcgtggggcgcgcggccaaaatcaaccgcatcatcctgcccgccgtcttgcagtggctgggcgagggccagaacccggacatgggcctgctcaactggcgcaagctggaggagaacttcggcaccgaatccggctacctcggcttcctgcgcgactccacctccgctgcccagcgtctgtgccacatcctgtccaactcgcgattcctgggcgacgcactcaacaagtcggtcgaatcgatcagttggctcggtgatgacggcaatctgcaggcccgcacgcgcgaggcattggatgtgcagaccggctcggcgctggaacgtttcggctcgaacatcaacgagttcgccacctccatgcgcgccatgcgccgccacgaaatcgaacgcatcggcctgtcttggatgagcggtgtgatcagcgactccgacagtctcaaggccatgaccgacgtgtatgacgcgatcatcgacgcctcactgacctgggccgtgcgccaccagatcgccgcgttcggcgtcgaaaccgcgccggccggcatcaccgtcatcgccatgggccgttacggcgggcgcgaagtgaacttcagctccgatgcggatgccattctcatctaccgtccggccgacgatgccgacgacggccaagccaacgccttcgccaagaaggtcgtggaagacctgcgcaacatcctgcaaggcccgacgacgctggaacccaagatcgaactcgacctggacctgcgcccggaaggcaagaacggcccgctcgtgcgctcctacgcctcctgcgaggaatactacgaatcctgggcctcgacctgggagcgccaggcgctgctgcgcgcccggtacgcggctggcgacgccgaactggcgcgggacttcctgatcaacatcgccgacccgttgcgctacccgaccacggagctgaccgaggccgaattgcagaacatccgcaagctcaaggcccgtatggaggccgagcgtctgccgcgcggcgtgcgtcgagaacgtcatctgaagctcggcaagggcggtctgtctgacgtggaatggaccgtgcaactcatgcagctccagcacgccggcgatatcaaagatctgcgcgtcaacggcacattggaggcattggacgtgctggaggccaagaagctcatcagcgctatcgatgcgattcagctgcgcaaggcatggacgttgtgcaccgcggcccgcaacggcaactatctgtggagcgggcgcgccaaccaggccgatattctgcctgatgacatctattcgctgggcggcatcgccgtctacctcggctacggcgcccaccgcggccagcatttcgagaacgacctgctggccgtgatgcgcaaatgccgtgacgtatgccagcgcctgttctacgggcaggccgaagacgaggcgactgcggcaaccaccgccacggcctccgccgcaacgcagcagccgcaaaccgcgcctcgcccgcgtatgcacgtgatcgcaccgcgactggaacgaaatcgacgccgcgcgcagcgataaggcagcatattcgttggattttcaggtgaacactcggtgaatgcggctgtccgaaaaatggcgtaagttatattaggtcacacaagggtggccacctgaaaaccacgagcgaaaaggtgagccttgtctgaagaaacgccaatggtcggcaaaagcgtcgtaacgctggacggcctgtctacaaaccagattctcgacctgctgcataaggccgaatacatcgattcccaccgcaaagaggttgcccatacctgcgatgggcgagtgctggccacgctgttctacgagccctccacccgtacgcgcctgagctttgagacggcaatgctgcgtctcggcggcaaggtcatcggattcgccggcgcgcagctggcctccgtgaccaagggcgaatccatcgccgacacgttgaagaccgtgtccaactacgtggacgtggtcgccatccgtcacccgaaggagggtgccgcgctggtggcctcccgcgccgcatccgtgccggtgatcaacgccggcgacggcggccacatgcatcccacgcagacgctggccgacctggccacgctgcagtcgcgcttcggccgcatcaccgacctgaccgtgggactgtgcggcgatttgaccttcggccgcaccgtgcactccctgatcgagaccctgtgccgcttcggcaacgtgcgcttcgtgcttatcagcccggacgagctcaagaccccgcagtacgtgatcgaccgcatcaacgccaccgacagctgctcctacgtggaagtgcgcgacctggcctccgtgatcggcgacctcgacgtgctgtacatgacccgcgtacagaaggaacgcttcttcaacgaagacgactacctgcgcctgcgcgacacctacattctcgacgaagagaagctgcagctcgccaagccgtccatggccgtgcttcacccgctgccgcgcgtcaacgaaatcgccgtggacgtggacgacgacccgcgtgccgcctacttcgaacaggtcaagaacggcatgctcgtgcgcatggccctcgaaagcaccgtggtgggcgacgaactgcccggatacgaaccgctcaaccccaaggaggttcaggcctgatggaagtcaccagcattcagaacggcatcattatcgaccatgtgccggccggaacctcgctgaaggttctcgaatacctgaaaatcgacccggccaaaaccaagcttgcgctcatcatgaacgccgactccaagcgttacggctccaaggacatcatcaaaatcgaagatgacaaggacatcgacctcgacgtgctcggcttcgtggcccgccaagccaccgtggacgtggtgcgcggcggcaagatcgtcgaaaagaagcagccgaacctgcccgagcacatcgtcggcgtgatttcctgcgtgaacccgcgctgcgtgaccaccgccgagcccggcatcaagcagatgttccacctcgtgcactccgagcggctcgaataccgctgcgactactgcgacgaggaagccaaactgtgagcatcaccctacgcaacatcaaggtctggaacaccggcgaggtcatcgacctcgtggtgcccgggaccgctgccgcctacttcgccgacacctccgccgtggctgacggcgccgacatcgacgccaccggcctgaccgtggcccccggtttcgaagacccacacgtccacttccgcgatcccggccagacctacaaggaatcgatggtctccggctgccgtgcgtccgcatccggcggatacacgaacgtgctcatcatgccgaacacgttgccggcactggatgggcagaccgtgtctggcccggaagcgaccggtgcaaaagaggttctggatgccggcttcgacaacgtcatcgacttcctgcagcagtacgatactgcgcatgacgttcaattgccggttcgttacgatctgtgcgtgtgcgcgtccaaggatcgcgccggtcatgaggcaagcgacgttgccgattggctcaagtacgtgcccggattcgaggacgacgccaagacgccggccatgctcacgcaccccatcaccgcaatcagcgacgacggttccgctgtgacgccggagatcctggaccaggtgctggagaacgtcaaggcctccgacctgtacctgatcgagcattgcgagcatcacgatacaggtgccgtgaacgaaggccccgtttcccgcgagcttggcgtgcccggcattccggaagacaccgagctcaagatcgtggcccgcgatatcgaagcggcccgccgcactggtgtccacgtacacttccagcatgtgagcactgccatctcgttcgaggcgattcgcaaggccaaggccgaaggactgccgattacctgcgagaccgcgccgcactatctggcgttgagcgacgaggcgctgctcaagtacggcacgctcgccaagatgaatccgccactgcgctccgaagcggaccgcaaagccaccatcgcggccatcgccgacggcaccgtggatctgctggccaccgaccatgcgccgcacacgttggcagagaaggaactcggcttccttgaggcgcccaacggcatcatcggactggaatgcgcgtacggcgtgtgccacaaggtgctcgtcgacggcggcttcatttccgatgagcgtctgatcgagctcatgtccgttggacctgccgaactcatggggcatgtgccaaccgacgtggccgcgctggtcgaggactacgccgaacccgcgcccaccggggatgatccggatggcgtgattgcgggggagagcgacgctcagccgcagcgtgaaggcgtcaaccgactgctcgacttgagccgcgtggatgacgccgacaatgtcgacctcgtggtgctcaacaccgccgaggaatggaccgtggaccccgaacagttccactccaaggctcgtaacaccccgttcggcggctggcaggtcaccggacgccccctcgccacaatcatcggctcccagctgatgttcagccgtctgtagataacacaaggagcagcatggatcgcctgatcgaagcgattgacaacactcagaaccccagcgtcgtgggccttgaccccactgaggcgctggtgccgccgcaggtcgtggcgagctttgccgacgaggtgcgtgactcggtcgaatccccggaggaagtcgaatccgcgcagctggccgtcgcctacttcgaatacaaccgcacgatcatcgacgccatcgccgacatcgtgcccgccgtcaaaccgcagatcgccatgtacgaggcgctcggccccgccggcgtggacatctacacgatgacctgcgaatacgctgcccagcaaggcctctacgtgctcggcgacatcaaacgcggcgacatcggctccactgcagccgcctacgcccaccacctgaacggcgtgggcgacttcgacccgtggcatgaggatgcggtgaccgtcaacccgtatctcggcaccgacggcatcaccccgttcgtcgaggccgccgccgaagccgacaaggacatcttcgtgctcgtgcgcacctccaacccgtcctccagcgaactgcagatgctcgacctggccgacggcacgaaggtctacgagcatgtagccgatctcgtggaaggctggggcgccgagaccatcggcagccacggctactcccgcgtgggcgcggtggtcggcgccacccaccccgaggaaggcaaggcgctgcgcgcgcgcatgccgcacacgttcttcctcgtgccgggctacggtgcgcagggcggcacggccgcggacgtggcaggcatgttcgacaagcagggcagcggcgccatcgtcaactcgtcgcgcggcattatcggcgcatggaagaagagcggcaagtactccgaatccatgaccgccgacgaggcgctggaccttgtggcgagcagcgcgcgccaggcggcgctcgacatgcgcgataatctgcgggttgccgtatataggtaggtagattgtccggctgtgggctatacgtgagtgtgggctggaaaccggagccgagtgtgtttaactacctctcagtcaacctgcggttgaccgctcccctgataaggggagcttgatgtgctgaataggaatgaaatgacaactttcacccccacccatgatgtggttacggaagcgactgcggccggattcttcccgccgcgccacaacgtcgaaatcacgcaggttacggaactgaccgaccgcgtgatgcgactgacgttccgcgacccgttcatcgcctcccatgccaagcccgcccagttcgtcaacctgttcacgcacgacgacttcatgctcatgccgcgtccgttcggcgtcagcgaagtcgacggcgacgaagtcagcgtgatcttcgccgtcgtgggccacggcaccgaacagttggcaggcctgcaggccggcgacaccgtcgacgtgctcggcccgctcggccgcggcttcaacctcaaggaagacgccaactacattctcgtcggcggcggactcggcgtgcccccgctaatctacgccgcgcaaaagctcgccgaacacgacgcctcctttgccaccgccgtattcggctaccgcaacgaccacttcgccgaggaatacgtctcccggtacgcggactggtcgtggagcatcgacgacgccgaaggcaacgtggtcgacctgctcaacaaactggaacaaggcgacgacctgaaggcctacgatcgcaagccgatcattctgtcctgcggaccgctgcctatgatgaaggccgtggccgcctgggccgccgaacgcggcatccccgcgcagctgagcatggaacaacgcatgggctgcggctatggcacctgcgtgctgtgcaccatcgacaccgtggacggccgcctcaaggtctgctccgacggacccgtgttcacccgcgaacagctcggatgggggaagtgacgatgagcgcaaacaaccagtccgcgcagggcagcgacaaccacatcaacctgtacgagccccacgtgtggaagcaccacaccaaggtggccggtctggaatggaagaatccggtcggcaccgcctccggcaccttccagtacgccgccgtccgctggttctacgacgtcagccagctcggcgccgtatgcaccaagggcgtctcgcccgtgccgtgggaaggcaatccctcgccgcgcaccgccgaatcgccggccgcgaacatcaacgccgtgggcctgcagaatcccggcatcgaccattacttggccgaggacctgcccaagctcaaggccgcgggcgcgttcgtcatctccaatgtcgccggacattgcgatgacgattacgcggcggtcgtggaaaagctcgccgactccgacgcagacatgctggaaatcaacgtcagctgcccgaacgtttccgccggcggcatgagcgtgggcaccgacccggtggccctcgccaatcttatggaccggctgcgcccgatgaccgacaagccgatgatcgtcaaactcacgccgaacgtcaccgacatcaccgtgccggcccgtgcggccgtggaacatggcgccgacgcgttgagcatgatcaacacgctcaaaggcatgcgcattaacattcgcaccggcaagccgatcatcgccaacgtcaccggcggcgtatccggcccggccgtgctgccggtcggcctggcagccgtctaccgggtgcgcaccgcactgccggagattccgatcatcggcctcggcggcatcgacagcggcgagaaggcgctcgaatacctgtacgccggcgcgaacgccgtcgaagtgggcgcggccgcgctcttcgacccggtggccccgctgcgcgtcgcccgcgaactcgacgacctgctggacagccgccccgagctcgctgctaaactggccgcaggacagacttggaggtaaggaacatcatggcagaaacactcgcacatcgcttcactgaattcctgttggaatccaacgcgctgaagttcggcgacttcacgctgaagtccggccgcaagagcccgtacttcatcaacgccggcgccttcgacgacggcaagaagatcgccgcgctcggcacgttctacgccgaaaagattagccaggccatcgtgcacaacacgattccccgcaacatcgacaccgtgttcggccccgcctacaagggcattccgctggccgtgtccaccgcgatcgcgctgaccgccggccacaacatgaccgtcggatacaccttcgaccgcaaggagaagaaggaccacggcgacggcggctggatggttggcaccccgctgaccgacggcatgaaggtgctgctcgtggacgacgtgatgaccgccggcaccgccgtgcgcgaagtcatccccaaactcaaggccgaggcgaacgtcgaggtcgtgggtctcgtgctctccgtggaccgcatggagaagaccaaggactccgacatgtccgccgtgaaggccgtggaagccgaattcggcttcccggtgctctccatcgccaacgtgcgcgagatcttcgacgccgccgccaagatgaagaaccccgacggcaccccgctgctcagccacgacatccagcagcgcgccgccgcctaccttgaggaatacggcgcctgatcgtcttcaatctaaaaaccaaaagcgggcttgcgagcccgctttttttattacgttccatgaacagcagcaccatattaaggcaaaagctttggcaaggagcgtgctatgaactggttagttgatatagggctgtttgcgctcgtggggatatgcagttacttcggcatcgagcatcatctggacagcaaagcgaacaagttgtcgcaaggtaatgaagaagaccgccgagatgctgatgcccaagtagaagcagcatgaaaatggcggaatgacgttggggtgacgccgctcatactcgggatatgacggatgaacagcctcttgaaacggagataaatgtctccagaaggccaaatcagctcccttgaaagcgagatagggttctaaactctgggaccgactcgcctgtgatgaaaacccgctcggcgtagaattaccgtaggttcgttgcattcgaacaaggaaggccgctatggggaacatcaccgacgatattcggcaacatttcgacactttcgccgaactgccgttcaccgaggcggatagcctcgctttgtcccagttggcctatgctcgcatgccggataacgtgccgcgctatcacgagaatgcagagaccgccgacggcatgatcgccacggttccgattcacgatttgctgcgtgccgaatgctatgacgacatgttcggcaaggtgtggtcgccttcgatgaatgtcgatctgttacgtgcgatgagcgagagcccacgttggaggaacctacgcgtgggcgcatacgtggacgaattcgatgctgcaaccaccaagcagttctcggcctgcgtgttcgaactgggtaacggcacgctctatgtggcttttcgcggtaccgacagctcaatcgtcgggtggaaagaggacttcatgatggcgttccgccgcccggtcgcctcgcaggaggccgccgcgcgttatctgaccgagctggctggccattgggccgggccgattatggtcggcggccattccaaaggcggcaatctggcggtgtatgcggcggccaatgtgcctagcgagattcaggaacgtatcacggtcgtatattcgcacgatgggcctggattcgatgaggtgttcttcgatgaggacgggtacgtacgcattgcgtcgaagatccataaatcggtaccgggctcgtcgatcatcggcatgctgtttgagactcgtgagcatgtggaagacggctatacggtggtcagcagcgacggtgccagcatcatgcagcatttcgcattgcactggcaagtcgatcatggccaattcgtacaggctgatggactgacaggtagcgcgcaatacctggcacgcacgatcaacggatggatggcaaaatacgacgacgagcatcgccgcaagttcatcgaaaacctgtttgccatcttcgaggctggcggatacgacacattcggcgacctcacttcgcatttgacacagtcactgccgattatgctcgccgcggcccgcaacattgatgtcgaagatcgcgacgtgatgattgaagtgctcaaaggcttcgccgcgacagccgccgcgtcggtaatcttggccaagtagtcggaggccatcaaactggttttgccagtcagtctcaatagcgcaaaagccggcccctgagatactcaggagccggcccttacttccatttccccagcggggttggcttaatcgcagtatatctcactgctgaccatgcctgttttacttactcctaatcaatgagcttgtagccgtggtcggagactacggacttgagcttgtcgagataggtttcggcggccttggagagcttggaacgctcgttcgtgatccagccgaccaacatcgtttcgtcggtgtcgagcggcacggtgacgatcttctcgttgttgaggtcgccgttgtcgatgccggtgcacaccgtgtagccgttgaggccgatgatgaagttcaggatcgtggcgcggtcggtcacgttgatctgcttgggggagtactccggccagaccgcttcctcatagaagtagaacgagccttcctcgccctgctcgtactggatgaacggataaggtttcaggtcctccatggtgatgaccttcttggcggccagcgggttgttgcgcgagatgaacacgtgcagcggcgcgcggaagagcgggtggaattcgaggtgcttctcgcgcaggagcttgccgatcacgtccttgttaaaatcggacaggtagatgatgccgatttcggactgcatgttggcgacctggttgatgatgtcgcgcgtgcgggtctcgcggatggtgaactcgtattcgtcggacttgatggagttgatcatctccacgaacgcctcgacggcgaacatgtagtgctgggtggagacctggcacagctgcttgcgcggtttggcatgcttatagcgctcttcgagcaggtcggcctggtcgagcacttggcgggcgtaggtcaggaattccgcgccgtccacggtcagggcgatgccctgcgaggagcgggtgaagatctcgatgcccagctcgttctccaattccttgaccgacgagctcagggccggctgggagacgtacagggcatgggaggcctcgttcatcgagccgcactcgacgattttgacgatgtatttcagctgcagcagtgtcataaagtctatttatatcgctagggatagtcgccacacggccggtcaccgtcgtcaaggacgggtccatagacttcaactgccgcgatgcaacgtttggcgacttacagacgtacgccgagttctgcgagcgattcgcgtgcctgcaacgcgttctcgaagaggatgccgtggatgccgacctcgttggcgccgacgatgttcttggcggcgtcgtcgaagaacacgcagcgctcggccgtgaggccgaaacgggtcagggccagctcgtagatgtcggcgttcggcttatgcatcttctccacgccggagaccacggtgccctgcaacagctgttcaaggcgcgggtacttctcgaaggccaggtggaaggtctcatgcgaccagttggtcagaccccatacgccgtagccgtgggccttcaaatccgccagcagctcgaccatgcccggaagcgtgcggggcagcgcgtccgcgtagtggccgatgtagaacttgaagatgtcggcgagttcctggccttgttcgcgtaccacatccgggtagatgtccgcgaaatcctcgccggtgtccatgcggtcctcgtagcggaagaagccgcaggggtcgtcgtcggcgcagatgcgttccacgatctcatcggggaatcggccttccaggcatgcgcgggtgttccagtccagcagcacgccgcagaagtcgaaaatcacgtcggtgatgggggagttggccatgatgctccttgtgttgttggggccgttgagtggggtctgcgatttagtatagggggtttcatacgttggctcccctctctgaggggagccaacgtacggaatcatgcgatgacgtcggcgatggcttcggggatggcgtgggccacgtcgccggccacaatcgggtggccgagcgtcatgaagcgctggcgatgctcgcggccgatcagttccggctcctgccagccttgttgctcggattcggaggcgatcgccgccgccaggccatgcaggtaggcggccgaggccacggtctcgcccgtggtggccacgtcatcctgctgggcgagcagggcgccggtcagaccggccagcacgtcgcccgcgccggcggtgcccagccaggccggtgcgctacccgacgcatagacgtggtcctcatccaccacgatggtcaccgcgcccttcaacaatacggtggcgccggtgagctcgtgggcacgcttcgcgctggccaacgggttcaaccgcacgtcgtcggcggtgtacggctcgtgcgaatcggcatgctccgcggtgctggcggcggtttcgaaccggttgagcagtttcgccatctcgccggcatgtggcgtgatcaccacctggccgggcacacgctccggcagcaggtcgagtgcgccggcatccaccacgattggcggcatgtcgtaggcgtccttgttctcatcctcgctgccgagcgcgtaatgcttgagcaatgcggcgatggtgtcccgctgcatatcgccgtcggtgccctcgacgctagcctcgggcacgccggaccccacgacccaggactgcacatgtcccttgccgatcacggcttccggcagtgcggcgagcaccatgttctgcgcgcgctccgggcccagataccggaccatgccggtgttcgcgcgggcggcggcgctggcggtgagcacggcggcaccggggtagcgctgcgagccggtcaccagaccaaccacgccccgggagtatttggaatcctcgaacctggggagacggaccgcgtcggacgcgaacgaattatccaccacctcgacgtccggatccttgtcgtcgatatcgaatccgaaatcgagcaactcgatacggccgcaggcgaacgtggcgggcggcagcaccgcgcacggcttcatcgcgccgaacgtgaccgtgaccgtggccggaatgtacgggccgggcagagaaccatcgttcacaccgacgccggatggcgtatccacggcaagtaccagcggaaaatcgcctgacgactcacggtttggcagggcgggctcatcgggagcctcgccgtcgagaccaagggcggaggcgagtgcggcggggatgccgcgtagcgagccttggatgccgatgccggtcatcgcgtcgatgatcagatgcgatttcctggccacggcgatggcggtctgcaatcgctcgccggcctcaccggcggaaaacccggacgcgcaaccgggaatatcagccgcgggatcaagcaccagcaccttgcctccggcgcgcacgaatgaggcgaatccggcctcatgcaacgaccggcccacggcgatggcggtgacgttcgcgccctcctgggccagcgcggcggccgcgaacagaccatcgccaccattgtctccggccccggccagcagcacgatcgacgtgtcctccagcgccagatcctcgtcgtccagcataccggccgccatgtgggccgcggcctgggcggccatgcgcatcagcggcacgcctttgtccagcaggggtcgctccatggcccggaccgtatcggagtcataggcgctgtgcagcagcagttcgcgacgatcggcgtcttcggtgtattccatggcaacccctttcttgtgtttgttacttgcggtccgtgtttacaggccgtacacctcgtgggcgaacttttcgaacacggggatcgagcgcttgaccttctccgtgtcgatgcagtaggccatgcggaagtatccgggcacgccgaagctgtcggacggcacaagaatcaggtcgtattccttggccttcatgcagaacgccacggcgtcgtcctccagcgccttggggaagatgtagaacgtgccgccggggcgtaccacgtcgaagccgatgccggtcagcgcatcgtagagcaggttcatgttcgtctcgtagacgttgagatcggcggtctggtcgatgaccttggccacgcccagctgaatcgagctcggcgggcagttgtggccggtgccgcgcgagatctggcccatcatgggcacgagcaggtcggcgtcggtggctgtgggattcaccgcgacatagccgatgcgttcgccaggcaggctcagcgacttcgaccacgagtagcaggtcagcgagttcgcgtagaagctggccgggtagggctgggtggcgccgtcgaacacgatttcgcggtacggttcgtcgctgatcaggaagatatcgtggccgtattcgacctgcttggcggtcaggatcgcggccagacgcttgagcgtgtccgctgaatacaccgcgccggacgggttgttcggggtgttgataagcacgacctgcacgttcgggttaagtgcagcctcgaatgcgtcgaagttgatttggaagttctcggtgtcggccggcacgatggtcagcttggcgccggcgcccttgacgtatggctggtattcggggaagtagggggcgaaggtgatgatctcatcgcccggcttggtcaccgcacgcatcgcgtgggacagcgcgcccgccgcgcccgtggtcgggaagatgtggttgccggtgtatgccatgccgaaacgttcgttgaggttttcggcgatcgcgtccttgacggatgggataccgagcgagggggagtagccgtggatggccaccggatcgccgttttcgtagaggtcgaccatggcgtcggtgaaggatttcggagccggcaccgagggattgccaaggctgtaatcgaacacgttctggtagccgatttcggcaccgcggctcgtggcgtactcgctcagctcgcgaatcacggacttgccgccaagcatggccttgtattcctcattgatcatggctgttctcctcgcatggttgtactggtatgcaccacgctactactatcgcggccggtttgcgccatttgccgcgccgtgcctaagctggctgttctatttgttctatttgttctattaactgtcgaaaccgcggaataacgccgatttccgctacagctccatgattatccacaaccgttcatagcgagcgctgtgggacggcgggcggaaaacggccgaatccgcgtgccgtcccacacctcgtgcaatccacgtttcgggaaagcaccaccgtaagaccggcgcgcatccgcatccacgacaggagccttaccggccgtaatcccgcactcgattattttttctgacagggaatcgaacccgaaacactaacccatgcacgccccaccgcaaacagcgaataaccaaatgtatgcattttcggcaccatgagcgaaggagttcgcaaacacaacagtgattggcatatacggcatcgaccggatgaacagcatcgcgtcctcataggtcaagacccactgggactcgtcgcccttgggtatagggacattgcctgtgtcatagtcgttaagcagcacaagactcggcaaatatcgttccaagatctcggcggtgccagcaatttccggttcggtggacctcgatagcaccttgatgacggcgtgaagtgcgtcaagccgcttgcgattgatggtataaccatcaacgagatgctgcttcagaactgagttggcccatcgccggaaatagatgccttccttggatttgacgcggtatccgaccgacaggatcatatccaggttgtaatgctcgacttggtatgtcttaccgtcagatgcagttgtcgcaaattttgcgacaactgaaaatccattgagctcttcccttaatgcattgccgacatgcttgccgattgttttgatatcgcggccaaacagcaaggccaattgctgtctgttaagccacaccgtgtcctcgtctaccttcacatcgaggtgcacggtgtggtccgcgctctcatacaaagcaatctgctgcttcagttcctcgccagtcatgagatcgcctttcttttttcgggcgtctgtaaatcatgtcgttgtcgtcgctaaattatgcatccagtttatcagggcagtcgaacgtttgttcgattactgtatctctcatatttgtatgactttcccggctcccgccatcaatcaccagtcgcaggtaatcgcggtcggcggacttgcggcgtggcacgaaacgactgatgatggagtccttcttgccgcggttcttcacgtacaggaaaccgaacacggagaacacgaccgcgccgatgaagttgacgaccagatcctccatcgtgtcgatcagaccgatgtcgaggtagccgccgaggcccaggtcttggccattgaccgtgacctgggtgatgtcgttgatgcgaatcgcatggttggtgtgcgtggggtcgagcatcaccgagctgatggaatgcacgatggcgtccttctgcatgtcgaacccgaacaactggtccatgccgaattcgaagaactcccagatcacgccgatggtcatggagaagcagaaggacacgatcgccagatacaggggcgaaagctcgaacttcacccggtcggaccggttgagcaggtcgaccagcgagaagccgatcgccgcagcgaggaagccgttcatcgtatgcaacaccgtgtcccagaacgggaagatctcatagaacgaactgatctcgccaagaatctcagccgagaacacgaacaccagcacgatgacttccagcaccgaaggcagctcgatgcggaactgcacctggatgaacgccggcgccaacagcagcagcaacgtcaggatgcacaggaacacattttcgtagtcgccgttaaagaactggagtattgccatggcgagcaccagcatgcgcagcaccacatagaccgcgaatgagcttttgtgttcgcggatttccatgcccacggctcggctcatggttttccagcgtacgcgccaggacggtttgcgttgtgcgtcgtgctgttgcgactgtttccgggtcatccttacctctttctcgcattgttctcgcgccagtctatccgaacctgctcacaggcaatcggcaagaacgggcgatagtctggccgcacgaaccgaacggaaaccgatactgtctcgattgtgggccacgcgaatcatccgacaatgctcgatgaggccattacgccggctcctcatggctactggtcgtagggctggcaatcatggccatgccggtagtttgggctatcgtgaggtgtgcgagatgggctttgtgccggctggcagcaaatccaagcagcgaaacaacggaatgaacgaagcgaaaggaacggtatctgatgactccgattgaattgtcaacccgacgccgggttacgggactgacttcggatgagttcgccaggctgttcgtctctttgcagcgtgaagtggacggcgaagccgcgcattggagcgccacggatgtcgaatcctgggagctggtcggcccgccggtgaccgccgaacagcatctcatcgacacgttcgccgcggccaacgaattcgtggccacgcttgcggaccgcctgtaccacacgattatgccagtcacggaagaatcggtcatcaccgcatacgctgatgacctcacattctgggcatcgcatccggaccttggcggagtgccgtgcgcattatggaacatcgccgcactgcaggcggccgaatgggcccgcaaggaaaccggcatcgcctgtgaactggacgtgcgcgaaccgctggtgtgacagctgagctcaaacatgcgtaggtaacggcatggtttgaggactatggtgttgcgttatcggtcggaaaggatgtgatggtggggcgtcatagcaaaaaagcgcgtggccagtcgaggagatatgcgcgaaagccctccgtttggagcgaaattcgcggctatctgctgacagtgatcgcggtgatgctggtcgtgttgctgggacgtaccttcgtgttcaacgtatatgtgattccatcccgcagcatggaagacacgttgcaaatcggcgaccgcgtatttgcctcgcgattgactccgagactctttacactgcaccgtggcgacatcatcgtgttcaaagatcccgcagactggatggagggggagcagcttcccaccaatctgatgtcgataatcgacagcaatcgttacctaatcaaacgtgtcatcggtctgcccggcgataccgtcgcctgcaagggatccggggagcccatcacggtcaacggcaaacccattgatgaaagcgcttatcttaagtccggcgtgaatccaagcgacagccctttttccgtaaccgttactgacagcaacgtgttcgtgcttggtgataatcgctccaattccagagattctcgataccatcttgacgacggcaacaatgggctagtgccatacgacgatatccaaggtgtggcgttgttccgcttctggccatttacgagaatcggcatactgaactgagtttggcgtgaatccacgagttgatacgtgccgcacggtccggtgcatcctgcagccggaccgttaccggaaccctcccccccgaaatctgacgacccccctgtctcacagctatcgtacagctccgatacgggaaacgtgcgggtgattccataacgactacgtacttcaggaagtgacgtgtatcacactatggtcatgtgttcagtgccgcagataggcgaagtttattcatgagccgaatagggccggtgaagcgggctctcactgcgttcataatacggcatatcgtgaacggcgttatcatcacagtcaggccgaattaaaggaggctcggtcatggtcgccgcatccacggcattcagcccgtcaagcacgatgacggccagtttggtggaatcgactggcctgcccagtgccgctattcctgtgcacgaggatggtaacaacggcaacggcgacagtagtgccgatggcagcggcgacgacggcggcatggtcagatcgctgagcctgtggaactacttcaccatgggattcggcgcaatcatcggcaccgtatgggtgctgctggtcggtgactggatgatcgtcggcggtggcccggtcgaggcgatgatcgccttcgtgctgggcgccgtgtttctgctgccgatcggctcgacgtccggcgcggttaccatggtcgggtcgtttctgcccggagtgctggtgatgacgccgctcttctacaccggtttcgacacgattccgcagagtgccgaagaggcaagcgaaggccttgactggaagaagttcggtatggtcatctcagcttcgctgctggccgccggcctaatcatcattggcctgcaggtgctgccgttctccccggccgcgctcaaacccacatcatgggcaatcgtggcggtgtggatttgctgggtctggcattgcgttggatcagtgcacgttcacggcgcgaatagcggtgcgccggtaggtcgcgagccgttcagtcgcgcgcgacccaaagcgtatcgaggtcgtcggcctcggtcgcctttttgcgcttgcgtacccactgttgcaggaaatacgccccatagcaggccacgatgaacacgagctcggccacgagcgcgaaccgttgctccacgtcgaaaatcaccaatacgaacgatgcggtgcacaggatgaacgccgcccaagacacgtacggatagccgggcgtgcggtatttgagttcgctggtggaatggccggactccagccaacggcgacggaacacgatctggcagtaggcgatggcgatccacaccaccacggcggacaggccggaaagcgccaccagcaccaggtacacagtcgaggcggcgatcacggaagacaggagcgccagcaggccaccggccatcgcggcgcacaaggcgagcatcggcacgccgcgacggttcgttttggcgaaccagcgcggaatcatgccttcgttgcccatcgaccacaccatgcgcgtggaggcgtacaggccggaattcgaggcggagagcacggccgtgagcaccacgaagttcatgatgtctcccgcataggggatgcctatgccgttgaacacgagcacgaacgggctttcgcccacgccggccttgcgccacgggatcagcgcgcacatcacggtgattgagccgatgaagaagagcaccagacgccacagggtggtgtggatggctttcggcacggcggtttgcgggtccctcgtctcaccggcggtcacgccgatgagttcggtgccggagaacgcgaagttgacggtcagaatcgtggcgaacaccggcatgaagccgttggggaagacgccgtccttgatgagattgacgaacatcggggcatgttggtagccggcgaccgggatgacgccgaagatggcgagcgatccgatgacgatgaacgcgcagatggcgaacaccttgatcgaggcgaaccagaattccgcttcggcgaagagccgcaccgacaaggcgtttaaggtgaagatgagaatgatgcacgccgcgctccacacccatgtggggctgtccgggaaccagcgttgcatgagcaggccggcggcggtgaattcggagccgagcgccaccgtccaggtgagccaatactggattgcgatcacgaagccggtgccagggccgatgaacttctcggcatacacatggaaggagccggtcaccggcatggccacggacagttcgccgagcgtgagcatgaccaggtagacgatcagcgcgccgatgctgtatgccaggatcgtgccgatggggcccgcctgctggatggtgtatccggagctcaggaacaggccggtgccgatcacgccgcctaatgagatcatctgcaggtggcgggattccatgccgcgcttcaggttggtatgtagggcgtgctcgtctttgccatcatgtgacgactcggactggctggtttgcgctggttgattcatctgttccgaatggcttcgacggccatccgtctgaatctgcggttcctgttgcgaggacggcgactgtgccgccgtgtcggtgtcgggctgactcatgtttctctctttgccatgcgtgcgttccataggcgtcgtcgtgacggcccggaatagtatacccgcaccgaggatatagctgcgctgcatgatgctgagtcaaaatcagcttcaaggggctgatttggcgtttgccggaggtctacttccgtttcaaggggctggtcaactggcggaacgcagatagaaatggcattgttctatcgctattccgccgtttttaaccagtggctactttggcatcagccccttgaaacggaagtagatgttccgcaaagtcaaaatcagccccttgaaacggagataggcactcgcagcggctacttcaccttctggatacgcagcacgaacacggcagcgcacacggccatgacgatggagatggcgaacgccggcgtgtaggtgccggtcgtggtcttgaccacggaggtgatggtgggaccgactgcttggccgagcgtggtggccaggttgaggatgccgaggcccttaccggcctcttccttgttcggcagcacgtcgacgttgagcgcttggtcgatggctgagtacacgccgtagccgaagccggcgatgcccgcatacaggtacatgcccgtgacgctcggcatgatccacggcatcgcggtgccaatcgcgaacagcagcgaggcgatgatgactggtaccttgtgcgtgtgcatcttgtcggagatcgggccggagatcagcgaagcggtcagggaaacgaccatggtgatgatggacatggtggcgatggtgccggcagcctcggtcttggtctggtgcacgtaatcctcgacgatgtagagttggtacacggagatcatctggtagctgagcaacatgcacactcggcagccgaacgccttgtagaagtcacgcgaggtggagaacttcgggaagtggaaggagacagcgagatccttgagcgtcatcttggtgcgttccatgtcctttgaggattcctcgcgaggtcagatgtcaagcgccacgaatccggaagcccatgatcacggcgccgatgatgaagccggcttgcgcattgttgatcatgcgagagccgatcatggtgccgatgggctggccggtgaccatgccgccgccgtagaaggagtcggtgccgcacagcttaggcatcgcgattatgtgcctcgtgctcatcatccgtatctgtctattgcctctcttcttctcccaaatgcgcgcgacgcagcgtatgcaggtgctccaaccgcaaatccaacgtatccaacgcaagtacgccgcgcgtaaggatccgcgttccaaagaagccatgcaacgtgaaattatggctttgcagcagcggcataacgccaatccgctcggttcatacctgcttcgctgattcaggcgccgattctgtgctcgctgttctacacgctgcaatccctgcccgcaagcgccgccgggaatgcggaaccgttgagcggcatcgaccgcgtcatggcgggcgacatcgaatcatcgtccatattcggcgtgcgcatcgccgactcgttcggcacggtcgtctcgccgcagtcgcacgtcgtcatcggcgtggccgtggcgttgatgtgtctgatgttgttcgcgatgcagtggctgctcatccatcgcaatacgccgaaggacgccatggattcaccgcagttccgcacgcagaagctgaccgcgtttgtgttcccggccatctacgtggtgtcgggcggcaccttgccgttcggcgtgctgctgtactggctgaccaataacctgtggaacttcggccagacgctctgccaactgcgatggtttccggcgcccggatccgaggcggggagcgcaaggccgaacgcgaccatgagcgggagaaccggcaccgcgccgcctccggattgccgtctttggaagaagagcgcgcggcggccgcgcgtgaggaggcccacgtgcgccgcgagcgtgaaaagtcggtcgccagccgcaatcgcagacagcgcaagaacgtgcagctcgccaagcgttgatggcacatgggagaggttacgggggatgcgctgagaccctcgtccccggaacggttcgaagtgctatactgcttgcactacgctgcgatgcctgagtgcaaacggatccaagaccttacgatgacaggatgaacgatgatggccacgaaccgcacattactggaacaggcccgagaattgcaggcgctggcccagaccggactgatgtactgcaaggaccccttcgaccgggagcgctacgagcgtatccgcgcgatggcggtcgacatgctctccacgcaggttgatgcgccggccggacaggtgagtcgactgctcagcgccggatatccgacgccgaaactcgacactcgtgcggccatcttcgatgaagaaggcaggatcctcatgacgcatgagaacagcggggaatggtcactgcccggaggctgggtcgacgagaaccagtccattcggtccaacgccgtcaaggaggtcaaggaggagactgggctcgatgtgaggggcgagcgactcatcgcggtgcaggactgcgccaatcacaacgcgctgacctatccgtacggggtgctcaagttcttcgtattgtgcagccgcgccggcggttggttctcggccaacatcgaaacgacggaaatccgctacttcgaggaagaccggttgccgcggctttcggaaacaagaaacaccgcggaacaaatcgccatgtgttttgcggcccaccgcgatcccgactggatgacgctatttgagtgaaccccgtgaaggcatccgcacatgcgcgttgcgcggcgccgcctggtcatcgtgccgacggcgagcatcggttccgaacactgacgccgaaccgtcgaagccgttcctgtggaaaatccgtgtccaggccatgcagaaccaggtggccatcgtcatgtgcaaccgggtcggcaaggaaggcgatgtgacgttcgccggccaatcggtggtggtggacccgtacggcaacgtcgtcagcaaggccgacgaccaagaacagttgattatcgtcgacatcgatctcacacagaccgcagcagcgcgcaaacagcggccattcctggaactgcgacgacccgaatggtacgactgaaggggcgaatgggtaataagcaatgtcacgattcgccgcacccatcagccgcattcgtgccggcctacagatacatgaccatacgcagattgcagccagctggtgcaaggcgggaatgtgaagtcattgtgcgtttgcttcgcgaagccgcgcaatgccggattcaaagcagctgctcatcattgctatggatgcgggactgaatggtcacttctcttggaccgccggtctcactgggagctagcgcgtcaccgtcgttgttccagaagcgcaatgcgccttgtcgggtctcatcgttgacggatagcaagagatctccctcaaatagtgtgcgtgctgtgcgatgctccgaacgagcatcttgatgttctgcacgaagcatgaggttcctgccccaacgatccggcatgcagtcttgaaagatgcgatgcatcgcattatgctcggccgggaacgttccggggggagaggggcatctctggacagagggatactgcgtttgaagagcgcatataggccgtatcgtatgtgaaatgtgccgattcgatgccgcgcctgatactggtgaataatttcccgacggtgacgtctgtgccgttgaactgcagggtgacgattgcttccatgatgtgttgcgcctcctgctgtactatcgaatacgttttggagtgtcttcgtcggcgcgtaatttgccgatatctgtgttaagagggtccgtcgcttgctgtacgccgtccagcagtccaagcagacgagcaatgcggaggaagttctcaaagctgccattacccgtacgcagcattttggtgaccgttggcatgaataatccagcccgctcggccagcaaggctacgggaatgcgctgttgtctgcgcgccaaatcgaggttggcggatatctgacgcatcgcccgactgaccgggattggtgtgcgtgtcggcatattggcacctcctatcccaaatttaaacataaatttgtatggactagccttatgcggaggttacgccaatatacgacaagaacgaaccaacgtcagcccggaatcttttcgacgatggtgttcaaggtgtcgaaagtctcatcgatttggtccactacctgcttgccctggttgaccatttcggtgatctgttccgtgcggggttgcggcagcgcatgaatcgacgtcttgacgcgcttcaagaccgcaccggcgtcggacaggtcctgcttgatggaagcgattttgggaatggaaagcgtgccgtcggagaagttcatgccggacagcagctcttcgatattgaagtccaccaacgtgccctgcgcggcactgtcgattttgggcagggcgttggtcgcggcgtcggcggccgcatccagcatgccgcgcaccgccttcacgtccgaaccgtaatacagcacgtattcggcggcctgccatagcatgccctgggtttcgtctcgcgccgcgacgatgtgactgccagcgctgtccatctgctcaagcgcctgcttgaagtcgccctgcccgacggattgctgtgcttcagccgcatattcgcccgcctgctgcgcctcgccgatcacccgttgtaccgactgccagaacagccagccggaaacgcccaccgccagcagaatagcgaccagtattgcaataacaacagtgccggtatgtttgcgcttagccataagaccaatgtaccttttgtcccatctagcgccattgtgttctggcctttagtccatcaaagtgtccaacagacttgtcttctctgaagaagcgcatggaaatcagttatagtcgattctctcctgtagctggcgaaaaacagatatagttgaattggactaacgggttttatgtagggatgccgaggaggacaaccatgaatcaggggagggctcgactggaacgaattcggtgatggagggctttgcgaaatccccggtcaatcgatttgctgactggttgggatggggattcgtcttcctcggagcgggtataggagcgtttctgggtgtcgtcgcgtacgttcaacactggattagctgacggcttcgaatagttctccgaccgcttctcggatttgccgggtggcatgaggttttcgaccgctcacgtagtggcggcgacctcacgctaatcagtaatacacactttgatctagcagaccctacggctaaggctaggaggccgacgatgggaaaccgcgtatggaaaggtgaaccttccgccggtggccgggccggaacgatcatcgctttgggcatcgcggcgttggtagtggcgggagtatggttcggatggactcgatactagggctatagtccggtttcgaatctgtcgcagacgttctcgatctcattttccgaggatgcgcgggcaatcgtcagcaaggacgaggaaagctttcatggggacggataccggtacgtgaaggtcgccgctgacccagaacaagtcgacggcaccattctggacggcagggattactccagtggccaactgccccaggagaacatccgcataatcaaggaagcggatgcgaccctgcgattgaacctgggaacacagctcgatgcgctctacgaccggcctcataaggagataaccaacgagggcggcacgctgatcatcatccatgatgccgattcctcggaatggcatttcttcgaatgcctcgtctgaaagctgagcactcccgaaacatatgcgattgtcctgaagaagagcccagaccaaccaggccccgattatccagataaaaagaaacccccagtgcatcacggctgagtcgaagaccgtccggagaggccctttgggggaattcttgatatatcataatgagccatgagccgacagtcaaattcaacaactgatttcctctcacggactccaaggaaaggaagtccgcgggagaaggcgctgcgcgcgtgcattaccgatgaacggcttgccacctacaattatgaggctcaaagacgttcatgcccagcgctagagctgtacctgtgggatcacgacatggccagcgcctgtatgggcgacatcgccatcctcgaggtcgctctgcgcaaccgcatggaccggcaactctccctcctcgctctggagcagaatggcactgaagactggtatatggcagggctacaattcgatgaccgaacccagtaccagattcgtgaagcgtggaaccatctcaccccgcaccagcgaaaaaatcatacgcatggccatctcatagcgtcattgacattcggattttggcgcaatctcttggaagacggcggaacaatccacacgaagtggccagaccagcgccgtgcagattatgagaacgatttatggcgcaaaggactcgataagacattctccaatgggcgccagtatgcccgtgcagtggaagaacgctggacgagaaagtacgcgctggatatcgtaaaaacagtgcatgccctgcgtaatcgggtcgctcaccatgagccgcttgtcaacggcatacctctgccgggtgagaatcgacggattgcattggagaatgcgacgcaggcgtgcttcgctctggcgatgatcctggaccgagacctacacgcatggttgatggataacagcaagatgaaacttgtgctcgaacacgagctgaagcctaatgaataggtagtgagtatcgttttcgccaatcatctcttcagtgggaatggcaatgagctgcagcgacaccaacagattccttaggatccgacaccggcacgtccggcctggtatgcgggttatggcaatgctcgatcgccaccgcgggcgaacccgtgccccacatgacatggaagtccttggatacggccgagatcatcgcgcacatcgcatccagggcgaacggatcattgtccaatacgggcgatacggatcgaccgcgccgcagccccggtcatgtcatcatgtcccatgccgctcatcgtggccacggtcgcagccggacaaaacctgctatcatgcgattacttgacacgatgttgcgcttttggccatgcgcaggttgaatgggattgcgccacgaaaggatatgccatgaacgatctgctgattatcgacatgctgcccacgtacgggctgctgttctacctgctgatctcggtattcgtcttcgtgggatgccgtggtctgcgccggaggacctcggatcgtggcctgctgcgttttgccgtaggcgcgttcttggttgtttccgcgctcggcgccgtgttcgctgcgctggtgtatatcatggcagcgcctttggcgcagccggatatggtcgacttctaccgcatgtaccggccaggagctctgatcttcctgctgggattgttcatcatacaatttgtcttcggcgtcgctgccgtgtatcggggaaagtaacctggtatatcctgcgataaacgcattggcagacacttgctgcctatctgtaaacacaccctagataaggcttgcggccgttggtcgagcacagtagtagtgtggtctgctgtgtcaacaggaggagtatgaccaatgcggctgattgagacatggctggcggaccaggaacgcgcgtttgacttgttcgcgaaattcccggcggaagagacgggattcgagaacccagcggccggcatgaatcgtgaacggttcgccgcatatgtgcgagggttgcgtgatgagtcgcttggcgtcggcctgccggacggctgggtgccagccaccaaatacattctcgtcaacgatgagggcgactatgtgggcatcttcaacctgcgtcaccggctcaccgacttcctgcgcaacggtccgggccacatcggctacggtgtcgcccgcgaataccgcggtcacggctacgcgaccgccgggctcaagctcacgcttgccaaggcccgcgagctcggcatcaaggaggcttacctgagtgtccacaaaaccaatccggcaagtcttgcggtgcagcagcattgcggcgcacgtatcgaccatgaggacaagacggaatactacacacgcatcgccacctgcacggagagcgatggcctctatgcgcgaggcgattgacggcgcctcttgcgtgtaaatggccgattatcaatcggttttaatcgatttcgcctcggtcgataaagtcgccgtcgaggaaccaataatcgtgcggatttccgcgtaacgccatgaacggcgtgagttccacgccctgtgtctcagatctgctcagcagataggctcggataatccacggatactccagcacgcccgacttgagggtgatgatttgctccactctgctgccgctgacgccaaaatccctgccgccgttcggcggtcagacccagccggctcatgttctcctgaaattcgcggatagtcgccgcgcgttgctcactgttcaaagacatggcttcatggtagcgccggacgcgtgtgggaggtcgggctgctcactggaatacgccgtcagagtagttgatcatttcgagttccgggcccatgtcttcggtttgagtcaggccggtctcatggaagccgatgtgacggtagaaaccttgggcgttggtgttgaatccggcgacccacaaggcgagccgatcgttgccgatggcgcgttggcccgcctcaaccaaagcacggccaacaccatgacgatggcaagattccaacacatatagcgaagccagttccgcagcctcggaccgtttgattggcgaacgcggcgtttgcagaagctcagcaaaaccaatcacgtggttgttctccaaagcgaccaatacgacctgattggggtctttggcgtggctgcgcgtcagtttgagcgcgaattcgggagtgatcgcatccacgatttcctgcggaatatgcccctgattgagttcgcgccacgtgcacgactgaacttgggccttttcctcaaaccatggcggctcaatcgaaacaatacgaatcgtcatgccgcccatagtaggccggttcgtgagtacagtgtcacttgttgtcatgtgattgcttggcatcaggttgtattgaccgtaatggaggccactggatcagcgccggaaactcatggaattcgggctattatgatgggagtaagaaaagcacagcacaattgaacataaagacgatctggagcattgcatgagcgtcaatacggcatttgaaaccagtgatttgcccaaagcggagtttatgtttcctgggcctgaacgcgatcgcttggtgaagctcattctggacggcgtaaaaaccgccaccgctgcgctgatgattgaatatgaggaagaggtcgaaccgctgccgtgcgttggcgcgcattcggtgttggtggattccgatgaacgacccgtagccgtactcgtcaccactgcggttgacgtgattccgctcggaaaagtcactgaccggtacgccatcgatgagggtgaaggcgacgtcacggcggcccaatggcggagcgcacacgaatctttctggaattcggcggaataccgcgatgaattcgccaacccaaactttccgttgaacgacaactcgctcatagtattcgagcatttcgaagtcgagcaacggttggagtcgaataacgcattaggttaggcgatagcaaaacttttcttcaggcaactctccgagctccgcaacatctgaaggaatgcccatgtccactagagcgacagaagcggaaagcgtattgaaggagcatatgggatatcttccggtatcggaaatggagcgtcgaggagtttcccgcacggagatttcgcgattcgtgcgtgaagccaagcttgagaaagcggcaaagggcttatatgtttcaccgaatgcggagtccgatccgctgttcgaattgcagtatcgatatccgaaagccattttttcgcatgaaactgcgttgttcttgcttggagagggggagcgagcccccctgacaccgacgattaccttaccgcaatcatcaggtacggctcgtctcaagaatgaagacgtaacagtgagaaaggtggccgacaatcgctttgcaattggcctggcgtcggctatcaccatgttcgggcgtacggttcgcgtttatgatttggaacgaaccatttgcgatttgttccgctcccgcagcacagtggatccgcaagatttgcaatccgccttccagaattacatgagatccgcgcacactgacttggtcaaactcatgaactacgctcgcgaatttcggctcgtgaacgtgatgcgcccttacctcgaagcggtgatgccagtatgaatgagagtgaaatcagacccgtgggacgcttatagaaagcggtgcggctatgcgcgtgactatgcttttagcgatgcaatacgggcgttgtcggctttatgcgaggcgatggccacggcatcgacggtgatgccggcatggttcaccggcgaattcatcttgtagacagattcagcatcttgtaggtagctggccttggcgagaggtcattgcaatggcggtattccgatcatcgccattggaatcatctgcctacaagagcacgaaacaccctacaagatgagacgggccagttgggtcagtcccattcatcctgccggttcgcaggccgcaattgtcagtcacaactggtgtatctccctcatccatgcgaatgagacgaatcgtctttcatcccaatgatttcgctctcgtggccgatacccgcgtgccgtcatgttccgtaccttggaatcagaagtcgagagtcatggtccgaaaccaaacggagcgggccgaagcagggagcattgaagatgggatttcttaagaacttttccgaaccgtttgcgttcgcgatggcgctgtggccgtttgtgtccatgctgctgacggtgccggtgctggcgctgctgtatcaccgcgacaatcgcatccgactgtcgtcggccatagtggcgtacggcacggtgctgtacctgctcggtctgctgtgtttcacactgtatccgatgccggccgatgcggcggcctattgcgccgcgcaccatctgacgccgcagctcaatccattgcagttcatcggcgacattcgtaccgatggtctcaccgccgtactgcaaatcgcgtttaatatcgtgttcttcctgccgttgggcttcatcatgggccgtatctggcgttggccgctgccggttaccgcagtactgtcgttcgccacgtcgctgtttctggagacgatgcagctgaccggcctcatgggcgtgttcccgtgcgcctaccgtctgttcgatgtggacgatctcctgtggaacacgaccggcgcgctgatcggattcgcgctggccatactttcgctgcgcctgattccggcgcgggtcgccgatatgacgccgaccaccacacctggcttcatgaggcggctgatcacgttcatcatcgacatgacgctgatcgcgttcgccgtgatgccgacgcatctgttcgtcatgatcgtccgctcgaacctgccctcgggctccaatggctcatggcagtcgatggaaccgttcgactggaccggctcgatcctcttcctggcggcgcttatcatctttgaaggcgtggtcccctggctgcgcggcggctgcacgctcggcggcagtttcacgcacatgacgatagagacccggccgcgcgaagggcggcttcgcgcggcgttctatgtggcgcgcatgacgacgctgatcgccgtggtgtggtggcatagcggcggattcaatctgctggtgttcatcggcctcggcatcttctggctggtcaagcgtcagatgccgtacgacctcatataagacgtaattcgccgaaaaagtggggctcttggctttcaaggggctgatttctttcgccgggaacatctacttggctttcgaggggctgctcaaacgccaaaccgcgagtataaacggctttgcggcaacgccattacgccattgtggagccttgtctactcgggcatcagccccttgaaacggagatagatctccggcaagtgccaaatcagcccctcgaaatcgagttaggcgttgttttcgcgtttgcgctgccgttcgagggcgtaatagaccgcataacagcaggcgacgaacggaatcatgcaatacagggtcgaacgttgcgtctcatcgagcaccacaagcaccagcgcgccgatgcacatcacgatggccagccacggcagcaccgggaaaccgggcgcacggtagtcgagctcatcggcgctgtgcccatcccgcgcccattcgcgccggaaacggatatggcacacgcacacggagaaccacaccaccagcgtcgccaaaccggataccgcgaccaacaccagatacacggtcgaggcggcgatcacggaagacagcaacgccagcagcgaacccgccatgctgaacagcacggcccacaccggcacaccacggaaattcgtcttggcgaatcgcgcgggaatcagccgctccttggccagcgaccataccatgcgcgaacaccaccacaatgaacacggccgaccacacccaggacggcgaatgaggaaaccatcgctgcatcagcagcccggccgccgtgaactccgatgcgagcgccaccgcccagttcagccaatacaggatagcaatggtgaacgcggtaccggggccgatgaaccgcttcgcatacatgtggaagctgccggcatacggcatggccacggacagttcgcccagcgagaccatcacacagtagacgagcagggagccgaccgcgtaggcgaggatcgcgtccaacggccccgcctgatgaatcgtatagccggagctgacgaacagaccggtgccaatcacaccgcccagggagatcatcgtcaggtggcgcgactccatctttcgctcaaggccggtatcgtccttgggtgtgccggctgccgccatgctcgggtctcctttggtcgggtgaacagttgtgtctcgtgtcggttgtgcgggcggcgctcgatgcctcctaccatatgatagcggtaacacgaacagcgagtgcccgatgtctatttagaagtgcaacacccttgttggtcctgtaattctaacagttcgtcggcgaacgcctcggcgggcgtccggtagccgagcacgcgcatggggcggttgttgatctcgtcgacgatctccctgacctcctttgccatgtccatccggatctcgcagcgtttgggcagataccggcggatcatgccgttgcggttctcgttgcttccccgctgccagctggagtacgggtcggcgaagtacgtggccatgcccagcccgtcgcgcagcctttcgtggtgggcgaactcggtgccgttgtcgtgcgtgacgctgacgcgcgcgccggccggcagcggcgagaacatgtccagctgcgccccgacgctctcgccggcggtcttgtccggaacgacgcgggccatgaggaacctggtcctcctctccacctcggtgtgcaggttgcatcccactccgatgacgctgtcggcctcccaatggccgaacgcgctcctgccgtcggcctccggcgggcgttcggagatgggcactcggccgggaatcgggaagcgcgacgtcctcctgccgccgtgcctgcggcgccgcctgtgccctcgcggcaggcaccgcgcccagcgttcccgaagcggcctgctggagtagacccatcggtagatggtctccgggcacacgcgcatgagcgcatcgtccggccacaggacgcgcagcctgccgctgataagcagcggcgaccagccgcggcccagccattcggccacctgcgcccacaggcggtcgtgcgacagccggtagggctttcgtggcttggatctcctgcggtcggccttgcgctgcgcgggcccggcgatgtagtagcggccggtccatggccccgccttcagtcttttcggccggtacgggcggtacgactcgttctcgttggacgggaaccatgtgttgcgcttgatctcccggctgatgctggacgggctgcggcccagcatcgcgccgatcccgcgtatgctggcgccgttgcctacctcgatctggatgacctggcgttcctcttccgacaggtgcgaatatacttctcccataggtgcgacatcccttcggactggttttctaggcaatttccaatctaacgggtgttgcactttcatttagacaacggggtggaacacgaggaatttggaatgacggaactgtatatcggatcgcatctgtcgacggccggcggatggaatgcgctgctggaacgctcccatgaggagggcggcaccgcgttcgcgttcttcccgcgatctccgtatggcaaacgttccaaggcgctcgacccggccggtgcggcggcgttcggtgcgcgtctgaaggctgagggctatgggccgttggtcgtccacgcgccgtacgtctacaatctggccggcaaggatgaggccaagcgcgcattcgcgatcgaggcgttggccgaggacatcgagctgctgaccgccatccgcgcggccggccaggaggtatatatcaacattcatcccggcgcgcatgtgggccaaggcgccgagaccggctgccggctgattagcgaggggctgaatcaggtgttcgagcgtgcggatggcgtcatggtgcttctggagaccatggccggcaaaggcacggaatgtggccgcaatttcgatgagctcgccacgatcatggatggcgtggagaataaggcgaacgtcggcgtcacgttcgacacctgccatgtgttggatgctggctacgatttggagaacgactacgacggcgtgatgcgccagttggatgaggtgatcggcttggccagggtcaaggcgattcatgtgaacgattcgcagttcggcctcggctcgcataaggaccgtcacgccaacatcggcgaagggcagctcggcatcccgttcttcacgcgactggtcaacgatccgaccatggccaagctcccgatgattctcgaaaccaaggagcagacgccgaccacgcaccgcgacgaaatcgcgctgctgcgcgggctggtggactgaatcacatcggcagttcagcaccaccaccggcagcaacggcacctactggtccacctaccaacggtgacatcgttgtcatgcgaacttcatataccacaattccacaacatgatttcatagttatgacactgtgatacatatatagcaaacaatgattcagtgacgatctctcgtcaaagatgttccgtcaaaacaggcgcatgggctcggtcgaatccaacggctgaatcaggcgtttgccgtcgccctgcagcggggcgacctcgtgaaattgcaagcggcgggataacgcagtgcctgagttccgcacgccggcgagcaaggatgcgccgtcgattgtgcggtccagccacggcgtcccattccaagtcgagcgcgaaacgtctgtacatgcgtgccagtttatgccaatgttctgcctaagccggaatcgcctgcgaaagcccaaaatgtaggacgggttcggcaatcgggacaggacgtgacctagagtggcgcatgaccgaacaccaacaaagggaggaccatgtcggttttggacgaactggtggcgggagcgctggaggatcagcgcacccgtgagctcaccgtatcgcttgaggatgtgaagaaggccacgctggcggccccggctccgattgacgcgacacgatggcttaagcgcgccgacggcatccccgtgatcgccgagatcaagcgcgcgtctccgtccaagggccacctgtccgacatcccggacccggccgcgctggcccgcgagtacgagaagggcggcgcaagcgccatctccgtgctcaccgaaggccgcaaattcctcggcagccttgacgatttcgacaaggtccgcgccgccgtgcacattccagtgctgcgcaaggacttcatcgtcaccgactaccagatcttcgaggcccgcgcccacggcgccgacctggtgctactcatcgtcgccgcattggacgacgcccagctcaagcacctgctcgacctggcgcacgagctcggcatgaccgtgctggtggagacgcacacccgcgaagagatcgaacgcgcccgcaaggccggtgccaaggtgatcggcatcaacgcgcgcaacctgaagaacctcaaggtggacgtgaacaaatacaacgaactcgcggccgatctgcccgatgacgtcatcaaggtggcggaatccggcgtattcggcgcggtcgaggtcgaagactacgcccgcgcgggagcggacgcggtactggtcggcgagggcgtggccaccgccgacaatcatgaacttgcagtggaacgactagtaaaggcaggagcacaagtgaaagcatccgaaacgaccccgctcagcgaacatcagggaccgtattggggccagttcggtggccgctatgtgcccgaggccctcatcaccgccctcgacgagcttgagcgcgtgtacacgcaagccaaggccgaccccgaattccacaaggaattcatgacgctccagcagcgttacgtgggccgcccgagcccgctgaccgaagccccgcgcttctccgcacttgtcaaagagaagaccggtcttgacgcccgtatcttcctcaagcgcgaggacttgaaccacaccggcgcgcacaagatcaacaacgcgctcggccaggccctgctcgtcaagcgcatgggcaagacccgcgtgatcgccgagaccggcgccggccagcacggcgtggccaccgccaccgtgtgcgccatgctcggcctcaagtgccgcatctacatgggccagatcgacgcccgccgtcaggccctcaacgtggcccgcatgcgtatgctcggcgccgaagtggtcgaggtgacccttggcgacaagatcctgaaggacgccatcaacgaagccctgcgcgactgggtcaccaacgtcaaggacacgcactacctgctcggcaccgtcgcgggcccgcacccgttcccggccatggtgcgcgacttccagaagatcatcggcgaggaggccaagcagcagctccaggactggtacggcatcgaccatccggacgcgatctgcgcctgcgtgggcggcggctccaacgccatcggcgtgatgaacgccttcctggacgacgagcgcgtgaacctctacggctacgaagccggcggcaacggccccgaatccggcaagcacgccatccgcttcgcccccggcaccggccagctcggcatgttccagggcgccaagagctacctgctggaaaccgacgaaggccagacgctcgacacctactcaatctccgcaggcctcgactatgcgtccgtgggccccgagcacgcatggctcaaggatatcggccgcgtgaactacagctgggccaccgacgaggaggccatgaacgccttccgcgacctgagccagaccgagggcatcatccccgccatcgaaagctcgcacgccgtggccggcgcgtacaaagccgccgccgatctgaaggccaagggctatgacaaggccgtgatgatcgtgaacatctccggccgaggcgacaaggacatggccaccgccggcaagtggttcggctacctgaccgacgaccaggccgccgcgctcgatgtgaccggcgcccacggcaatactgtcgcctgaacaagaagaggagatttttgattatgaccaacgaagcaaccacgccgtccggccagccgctgggcatcagccacaatcccagcaagtcaggcgctatgttcaccaagttcaaggccgagaacaagcccgccttcatcggctacctgccctacggcttccctaacccggacgtctcgcttgacgccttcaagacgatggtcgagcacggcgtcgacgccgtggaaatcggcctgccgtactccgacccggtcatggacggcccggtcatccaggctgccgcctccatcgccctgaacaacggcgagaccatcaagcgcgtgttcgaggccgtcgaaaccgtggccaacgccggcggcgtgccgctcatcatgagctactggaacctcgtgtaccactacggcgtcgagcgcttcgcccgcgacttcgagaacgccggcggcgccggtctcatcaccccggaccttatcccggacgaggcgggggagtggatcgaagcctccgaccgccacggactcgaccgcatcttcctggtctccccggactcgtccaccgagcgcctcgaaaccgtggcccgcaacgcacgtggcttcgtgtacgcggccgcccgcatgggcgtcaccggcgaacgcgccaccatcgacgcctcgcccgaactcctcgtggaacgtacccgtcaggccggtgccgagaacgtgtgcgtgggcatcggcgtgtccaccgccgaacagggcgccaaggtcggctcctacgcggacggcgtcatcgtcggctccgcgctcgtgcacaccctgctcgcggacgacaacaagaccgcacgcgacccgaaggaaggcttgaagctgctcgccgccaagagcgaggaactggccgaaggcatccacaacgcccggtaaacacccggtgcgcctcacgcgggttgtgccgtgacacggtagggtagtcacagagcgtcaagcacaacccgcgcgtggacacacaccatgagcaccagcaagtagaggcacgatgaatctggcttatattccctcgccgaccttctccaagttcgagatcggcccgttcactatccacatgtacgcgatctgcatcctgatcggcatctgcgtggccgtatggatcctcgccacacgttggaagcggtacggcggcaccttcgaccagattctcgataccacgctcgtcaccgtgccctgcgcactggtgggcgcgcgcctttaccactgcatcaccacgccggccgactacttcccgcccaccggcaacttggtcaacatcctcaaggtgtgggaaggcggcatggccatcttcggcggcatctccgtcggcaccttggtggcgttcctgtggtgccgtcacaagcactatccgttcgcgatcttcgccgatgccatcgcccccgcgctgcccgtggcccaggccatcggccgactcggcaactggttcaaccaagagctctacggctggcccaccacgttgccgtggggcctgaagctcaacgacgcggacgccatcggcaaatccgaaatctgctattctggcgcgcaatgcccggactacaggaccacgctgttccacccgacgttcctgtacgagatgatctggaacctcattggcgccgcgctcatcatctacctcggccacaagcttgccgaccggctcaaggccggccagcagttcgccatgtacctgatgtggtacggcctgggccgcacctggatcgagaacgtgcgcatcaactattccacggtgatcctgggcctgaggaccaacgtgtggaccgcgatcatcgtcttcgtgctcggctgcatcctgttcgtcgtgctctaccagtacgggccggaccccaaggcgcaggcgcgcgggcttgcggcggtcaccgccgacgagctcgaacgccagagcatcgaagaggaacaacttcgccagaaaaagcaaaccaatcgcactaagtgacaccacgataaacagcgccgaaacagcgcgaaacacggggctccaagtcccattgcacagataaggtaggaaaccatgagcaatatcgcaatcgcacccagcatcctgtccgctgacttctgcaacctcgaacgtgatctcaaggccatcgccaacgccgacttggtccacgtcgatgtcatggatcatcatttcgtgccgaacctgaccctgggcgagccgatcgtcggccgcatctgtcaggtcaccgatctgccggtcgacgtgcacctcatgatcgaggacccggatcgttgggctcccgaatacgccaagctcggcgccgcctccgtctccttccacatgggtgccacccacgcccctgtgcgtctggcccgccagctgcgcgagatgggctgcaaggcctgcttcgccgtgcgtccggccgaaccggtcgagccgatcttcgatatcctcgacgagttcgacatggtcctcatcatgaccgttgagcccggcttcggcggccagaagttcctcgacaaccagatgtccaaagtccgccgcctgcgcgatgagatcacccgccgtggcttgaagacccgcatccaagtcgatggcggtgtgagccccaagaccgcgcacatcgtggccgaggccggtgccgacgtgctcgttgccggttccgccgtgtacggcgccgagaatcctgcccaagccattgacgacatccgcaccaaggccgaggccgcgttcaaggcctgagctccaagcctgaaccgcaatccacctttcatcaataaccacaagaaaagaatctgaatcacatgaagacgtttgaatccctgttcgccgaactgtccgaaaaggcccagacccgccccgaaggctccctgaccgtcgacgagctcgacaagggcacccacttcatcggcaagaagatcatcgaagaggccggcgagacctggatggccgccgaatacgagggtgcggaccgcaccgccgaggaaatgagccagctgctctaccacgtccaggtcatgatgatcaagcacggcctgacgcttgaggacgtctacaagcacctgtgagaggaacgcaaatgctgagaatcgcagtgcccaacaagggcatgctatccgaacccgcgtggaacatgctggccgaggccggctaccgtctgcgcaccaaccctcgccagctggtcgtgcaagatcccgacaatggcatcgagctgttctacctgcgtccgctcgatatcgccgtatacgtgggccgcggcgccatcgacgtcggcatcaccggccaggatctgctcaagaactccggtaccgccgcgctcgagcacatgccgctcggctttggtacctcgaccttccgtttcgccgcaccgaacgaatccccgatcaccactctggaggatattcagggcaagcgcgtggccaccacattcgataagctcgtacatgactatctggtcgagcacggcatccaggccgagaccatccatctggacggtgcggtcgaatcctccgtgcagctgggcgtggccgacctcatcgcagacgtggtctccaccggtaccaccctgcgcaacgccggcctgcgcgtgtttgccgaaccgctcatgcactccgaagcctgcctgattcgttcgccgcgtctgaacgagcaggactcacgtctggccgtgctgacccgccgtctgcaaggcgtgctcactgcacatcagtatgtgctgatggactatgacattccgatcagcaaggtcgctgccgccgtggctgtgacccccggctttgaaagcccgacgatctccccgctgcacgataaacagtggaacgccgtgcgagtcatggttcccaaggccaaggtcaaccagctgatggatgatttgtacgaagtcggcgcacgcggcatcatcgttaccgctctacaagcctcccgcatgtagactgttagtcgatatgaccaaccagaaagtcaacaccagatacagtccggaagcacgtgacatctatttcaccgtgcccaatttgatcagcgcgctgcgaatcatctcgattcctttcatcagcgtgctgatttccaagcacgagatgattgcggcgttagccctgatcgccatttcctcggcttcggacggactcgacggcatcatcgcgcgcagattcaaccaagtgagcaagatcggtcagattcttgatccgatcgccgaccgactgctcattttctgctcgattctggccctcagcgtcgctggcatcatcccatggtggatgctgattatcgtgggactgagggatctgtggatggcgattcaggtgctatggcttgcccagtacggttatggtccgctgcccgtgcatttcgtgggcaaggccggtaccgcgctgctgatgatttccatcgtcagtctgattttcgccgatttgggcaccaatacgttcttccacttgctctacatcgccgcgctggccgccggcatctggggcatcgccatgtattggctcgccggatatatctataccgagcagggcatcagattgctacgcaaggaactgggggagaagtatggcgcttgaggccacggccccggtctcattccccgtacccaaggagaatgagccggtacgacgccgcgccgtgttctcccactcagtccgaggcgcggaatcgcatcatgcactttccccggatgacgccgccgccatccgcaccagacgccgccgtaaaaccaacgacgattcgcttcagctcatcgatgatcttgtcaatcgtccgatggatccgatgttctccgactcacgactggtccatgagcatcgttcgaccttctctatctggtttaatcgcatcgtcgtattcatcatctgcgtcggcgttggctttgcctacagcctattcgtgcaacagttgcaatccgatccgcgtaagcaggtacggcagactttggccacgcaattggagaatcgcaactcgcaaatagacgaactcaccacggccgtcaataatttgcgctcacaagttgacgaacagtccaagaaaatctccggcagcgtgaaaagcgacacgcttatccaagacgaaatggtcaatggtgccacggtggtcgaaggcgaaggaatcaccatgacactggccgatccaatcgcggcaagccagtcggatcaatcctcctcgacgagagtcggcacctccaccaacatccgagtcatcaccgatctggatctgcagcaactggtctccctgatgttccaaaacggagccgaagccattgccatcaacggtaataggctcggcgcgcaaacctcgatacgcaaggccggcgggcatattctcatcggcatgaccgcgatacaaagcccctataccattgaagccataggcgataagagcgccttggccgaagcgatgggggagaagaaacttgcaagtctttacgattccttcaaggaagccggtatctacccgcaggtgagcaaatccaattcgattacacttgaggcagcagtcactggcgaagtgaagtacgcggaaaggaatgaataatggcagccgttctgggactgatcatcggcgtcgtcatcggcgtgttcgtcaagccggacattccgatcgtcgtgcagccttatctgccgattatggtggtcgctgctcttgacgccctgctgggtgccgcgcgagcctatttcgagcgcagcttctccgaccgcgtgtttgtgatctccttcctcgccaacgtggtgacggcaacactgctcgtgttcctcggcaaccagctcggcgtcggttcgcagctgcagacggccgtcatcgtcgtactcggcatccgcatcttctccaacgtgtccgcgatcagacgcttcatcttccgaggctgacaagggtactgacgtatggcacgtaaagcacaatcagacaacatgctggagaaaatgcgcgaccagcatgcacaagacaaggtcaacgaccggatggaaaccgggtcgttccccacggtgcgcaagaagccccggaaggatctcaaccgggccagcaacaaatcacggctactatcctcgattctcatcgctctgatgtgcgcgttgttggggttcgcctacatgagccagatcaataacactaaatccacgtacgaaacgatggacgagagtgaactggtaaggctgctgaacgagtcgaatacgcaaatctccaatctcgagcagcgtaaaacccagttgaacagccagctcaactcgctgaaatcggcggctaacgagcaggaacaggcgcgtaagatcgccaagcaaaacgaggagaccagcggcttgatttccggcagactcccggcaaggggccaaggcgtgaccatccgaatcggacgaggctcgacgactaaagtggacgcctcaatcatgttcaaccttatcgaggaactccgcaatgccggtgccgaggtaatcgccatcaataacgtgcgtgtcatcacatccacctacattcaggacgccgaggaaggtttgattgtggatggcaccaccatcaagcccacatacaaggtgaaggccatcggcaatccgcaggagctgtccaacgcagtcgatatcgccggcggtgtgggcgctcagctccaggtgaaatacggatccaacgtcaacgtacagccttctgacagcatcattatcgacgaagtacgcgaagctacgcaaaaccagtatgcaaagacggtagaataggggattatgaccaacccgattcctagcgcaggcgaaaccaccattatcggcctgcccgcgattaatgtactgcccattaccaccaccggcgatcgaccgctgactcaagaggatctggacaccatcaccagattgtccgagggaacggcattgctgatttccgccaggggagcggtctcaggttctcgttacttgcttgacgaggatgaaatcaccgtcggtcgtgatccgcgagctgatattctgctcgacgactccaccgtatcccgtcagcatgccgtgttccgcagggtcaacggtcagttctttgtggttgacgcaggaagtctgaacggcacctacgtgaaccgtcagcgtgttgatcaggcggcgctgaagaacggcgacgaaatcatgatcggtaaattccgtctcgtgttcttcacgaaatccgccattatatcccaatagtccacacccagcacggggttagactgattgcagaaattgcaatcatgtgattacaccagtgtgagtcacatgcgagacacgcatgagttaggggagtgccatgggacaggccgggctgcatcttcatgtttcgcttgaggaccgtcagaatctgaacgctgacgcgattcagggggagttgttctccaacgtcgatactgaggagatcaagcgcggctatcgtggcactgtggcctccaaggtggccggcatcacgtaccgacagctcgattattgggcacgcaagcagattgttgagccgtccatcacgccgtctcatggctccggttcacgccgactgtactcgtttaaggatgtggtgattctcgctgtatccaagaagttgcttgatgccggtgtgaatctgcagaacgtgacggcggctatcggattcttgactcaacgcagcaccgatcagctggccaatgtgaccatcatgtgcgatggtcaaaacgtgcatgaatgcacgaccagcgaacagatgctcgaactgttgcaaagcggtaaggcagtgttcgccgtgtcggtgggttcgttgtggcaccagattgagacggccttggaacaggaagaatatgttgatcttgaggccaagccgctgacgattgccacgggccgtccgattgatgaactgactgccatgaggatgcgcaagaagctcgaggcacagcgcttgcaacgcgcagccgcctgatacatgtatggttgttggcgacttgctggctttggtcggcaggtcgctttgttgtatgtgttgcttttgttgcctgccattttatgtttttatatgttgcggtgattattatgactgattggaggaccgggtgaacgggcttgttgtcggattgttgccgggcgttctgtggatggtcgccgtcatctttgctgtgtccatcatcactataacggtcagccgaggccatctgttcacgccgaaacgccggcgaccgccggtcgatccggtcgactggtcgatggtgaaaacgcatttcatgtcgtttgcggcggcgctgattccgtttcccgtattgacgttcaccgcagatctgatggatgctcgcatgctcgcgttctacgaccacgcgcaattgcccggagcaatcatcatattcgtgctggtgctgctggaactcatcgccatgtatctgcaggcacgcaacgcctcagaaaccgaaatggataggcgtttaggtgttgcttttcaccggaataaagatgatattaaataaccgataatgtacgttatgtcagattagttatccttgacaaggattcggtcgcctgtatcaactagtccacgcataccaaggccgacagccaaaggagcaccggagcataccaggccgacagccaaaggagcaccggagcgaccaccgcaattgcaagaatcgccgtgcctttcagccaatccttgtcatctcgtttccagtggaatgctcgccaaatgaaccatatcagcatgggaatctcatacagcgacagcaatggcaaaccgatgaaaaccaggtcgaagcctgcggcgcaggctccatcgcatcccatcatgaagaagtcctcgccgttgtgtttcagtgtgtttggaaataacggtttacggcttcttcgatctgctcgggcttctcgatgatttcgtaggcaccgtgttcttccatctcaccggccggagcgtagccccagcggcagccaatggcgtccagattgcaggcgtgggcgccgtcgatgtcggtgtagcggtcgccgatcatcacggccttgtcccccgctgcagcatcaaaaccgattttgtcgaagcagtaccgaatcacctgatccttgtccaaacgagagttatccctggatgcgccatagatgccgtccaacagctcggtcagatggaaatgctcacagatcggaacgcattggtactcgggcttgcagctggccaacgccagataatagccgtcggcacgcagcttgagcagctgttcgcggataccgggaaacacgacgttcaccaagcggccgggaactttgttgccgggctcgttcggatcatcgaacacggcgcgatccgcatagtagctgcggtagatggtgaccgcccggtcaagctcatcctccggcacatggttgcgtcgcagcgattcgatgatggccggaccaatgaaacgatgcagctcggcatcgtcgggaaccgggcgacccaattcctcgaacgtcttgacgacggaggcgatgatgccgccgtcggacttggtaagcgtgccgtcgaggtccaacaggaccactttcatcggatgctgtgccattgagattccactcccctttgttcatgtcgactgctttgaatggtcgtcaaacgatatgcgacttgttccaacaatgattatgcccagtcgggatgactgggcatcaagttcacgtgttgttcagtaggagatcactcgtagtcaggaatccaaccgtcacggtgcatttgcaggcgcttttcgagtagggtggccagttcctcttcgctacggcgttccagcagcatgtcccagtgggtgcgggtgggtttgctgatctcgtcgccctcacggtcggcgtcgccctcacggtgggccacggaaccacaacggcactcccactcgtccgggatttcggcaccctcggcaaacggcaggatggtgcggtggcccttcgggcatacatacgccacatcgtttcgtgcggcgaaatcgacgttgtcgtcggactccagcgatttcgctccgatgctcatgcccctgaggctacgttctgccatatcggcatcctccttgaaagatctttaaccctactaatttacgcaacagttcggacttggccgctattccaagcttccgacgtcggctgacaaactcccatcaaacggccccccgtcagtccacgccggagtaggccaccacgccacgattgacccggtcggccgcttcgtgggcgaggcctgccagccgctctcccccgtcgaacggcagcggctgggcgacagcgatctgctgcagcacgtcagccagtcgtttggcagtgcgcacgaagtcgccgccggtcatgtcggtgccgtacaggcacgatcccagcgaaccgccatccgcccattcatacatgatgtcgagaatgccgaagtccggccgctgcatctcgtccagaccgtgatcctcgcacaggatatcgatgtcttcacagatgcccttgagcttggacgaagcgattgcgatgggcccggagatgccgcccgggtagtgcctcggttcgccgtctcccccgcgtctggcctcgtataccagtgaagagagcacagcggccagtccgttggcgtcgagcttgtcgaacgtgccggcgagcagcgcctcgcacagttccaggtcatgttcactgtagatgcggcgcagcagcgagcctttttcggtcaacgtcatgtcaatgcggccggccacattgacatgacgttcgaggtaaccaagcccggtgagaatatcgcagatgcgatcgaactgacgggccacggacccggtacgggagtcgtagcgatcggtgacgcgctgcagttcgcgggtctcgcgggcccagcggtggccccacttgaggtgttgctggaggtccgggcagttgcggcatggatgctcgtgctccgccttgcgcaaatcgcgaatgcgctggtcaaggttctggaaggcgcgtgaacgctcctgatcggtcaggaacacctcgtgcttcagtttgcggcggccttccttttcgatgtcgctcagctccatacgcagggtcatgaactgtttgaagtcgccgtgttcgcatgcgaacgcctgttcgtatccggccagcgcgttcttcagtgtgttgatctgcgattccagctgccaggccgattcgttggcctcccactgggcaaacgactggtccagggtaacgtgcgcggtctcgtagtcgctggagttgagcaggttcacggccatgttgaacgtgggtcggaagctcgagtgcagcgggtagacacgcttggatgacagcgcggcggccgtggcgggcacaaaaccgtgatggtcaaccacgatggcgtggccgatggtgtcgatgccgcgccgaccggcacgaccggtgagctgcgtgaattcgccgggcgtcaggcccacatgaccggtaccgtcgaacttctcgagtttctctaccaccacgcagcgggccggcatattgatgcccaaggccagtgtttccgtggcgaacaccattttgaccagaccttcttcgaacaatcgttcgactatctggcggaacagggcaatcatgccggcatgatgcgaagcgaagccttcttccaacgcaaagcggaacttggagaactgcagggctttcaggtcttcctgagtgagttgcccctccaccatctcatccacgatgcggcgaatcttggtcacttcctcatcggtggtgagctccagtccagcgttgatacactgttccacggcctggtcacaaccgttgcgcgagaagatgaagtagatgccgggcaacattcccagaaagttaagctcgtccaccacggcccagcggcgcggggtgtggcgttccgctttcggggcatggcccttggcgcctttgccgccgcggcctctgccgaagcccttgcgcttatcggggcgttcctcgccgcgccggcgtgcggccttgcggtccaactggtcgagccggttgatgagttcggcgttgagcttggtggtctgctcgccgttgccgtcgcggcgatagagatccagcacctcaggctcggtgtgttcgtccgcctgcacgatgacgtgctgttccaaaggcacggggcggtgttcgctgatcaccagtttggtgtcgcctcgcaccgaggcaatccagttggagaaatcctccacgttggatacggtagcggacaggccgacgatcttgaccgtcttgggcaggtggatgatgacttcctcccacacgggcccgcggaaccggtcggccagatagtgcacttcgtcgagaatcacgtagcgcagtgcgttcagcgtggtggaacgctcgtagagcatgttgcgcagcacttcggtggtcatgaccacgatgtccgcctcggagttgatcgaggtgtcgccagtgagcaggcctaccttgtccgggccgtacacgtcgaccagatcatggtatttctgattgctcagcgccttgatcggtgtggtatagaaggctttgacgttgcgttcctgagcgagataaatggcaaaatccgccacgacggttttgccggcaccggttggggccgcgaccagtacgttgctgccggcttcgagcgcgtcattggcttcggtctggaagtcgtccagttcgaagggcagggattcggcgaatcgtgctgctgcggacgcccgatggcgttggactttttggaatgatgcgtaccgctgcgaagggctcagcgtctgggaaccggcattgcccttatggtgttggtgacgtgccattgctgctttccgttagttgttgaatcgcttccagcgggcccatgcctgggtgtggcgctcgcgcttggcggccttgctgcgaatcacgtccgcatgggcctcggcataacgattctgtgccacgctgagcggctgagtgaacagaggcggctcgctggtgtcggcagaggtgccggactcccccatcgcggccacgcgttcaccgagctggccgccgatgtcggacatgtctttcaaggcacggagtccatgaagggctgcatagatgagtccggcaacaatcatggccagcatgaacagggccagaatcagccatatccaccaaggcatgaaaggctccttacttgttctcgctgatgctcagttcgcgttcggcgcgtgccacgatcatggtgcgcaacgtttccggggcgaccgctgtgatatgacgcgcgtgtgcgatacagaaggccacgaaccaggaatcggaggaaacggtcagatgcaccttttcaccggcaccgcattgttcgacggtagcgcccggcaatgtcttgatgaatgccagatcgcgctgatcggtgatgaacaccgcgtcggtaccgttgtcgaaactccacttgcgcagttcgctcaccggcatgttcgggatgttgatctgcttggtgggcttgaccagttccgccttttcgatacgggccaagcgcagcacctgccagatgcgcggcttgccgttcgccttgtcgatggtcttgtctttggagacgtaggccttcttgtccttgggagcggcggaaccgacatccgtgtagacggcggcataatacacgccttcgtcgatgaaaatcttggcgggggccaccagcttgcgacgggtactaccggtaccgtcggagtactccatgtccaacagcgaatcggtgttgatcgcgcgcttgacgatggagaagcttcggggctccagctcatagccggtcaggctcagccacggggtctgtcccgggctgacatggcggcgcaaacgctcatacagggattcggcctgcccacgctgcttgtccggcagtaacggcgaatgcgccaagtagctgaccgaggcggtgagcatgctgaggtattgcggcgaaatgccggcaagacgttcaaggcccaacgagttggtggcggaaacaataccctcggcatccagcagcggccagtcgatatcgaagaactggctgccagccatctcaccatcgtcggaaacggtggtcagggtgttgatgtccttatgaatgatgttgacgaatttcttgagctcgtcgtcgttcttcggtttgccgataaagcgctcggccagctcgctcatcgagaattcctcacccaggtgagcggagaggaacagcatcagacgcaggcgacgatccacctcgctgcccgtttggaaagcggatccgttcttcttgttctgggccttgatcgactcgggatcacccggctcacgaacatcgcgactaatcgacggggaaaccaccgaggcgcttacagggctggcggattcgtcagccagagtgaatcggctggcggcgtgcaggcggcgatgataggcgtccacagcctcctgcgggctgacaatcgtggcacccggatgctccagcacaaacatggccaaatcgtcggaatcggtgtaggccacgttcaggtgttcgccgtccacatcaacggtggcggcaaagcgacgcgaatcgataaccttgaccagcgagtccggaatgggctgcgtgcccaagccaggcgcaatcgaatccaaaccgagaccgggaataggggtctgcggcacacgcggcgtggtgcgcgacgcatgttgggcgagctgggactgatccggctcggaggaaatcgacatcgaacgagccagatagttggcggcggcaagcaccggcatatcttccggctcgaacatcagacggatgcgcggttcgtcgcccaactgcagacggtaggacgcgaagtcctggccttccgacttggacgaatactcaggctgccgtgattcgatggcgatgcccatagcggcgagcttggcgcgatcacgctggaactgcttggcgaacgcggccttggcagcctgatctgccagctctccatacgagtcggcgtaagccttgacgcgctgcgcaatttggcgggatgtgagccattgcgggaacgcggatgacaacacagccagtacgtccagctcgtgcttgccccatttgtcggaaaaacgccgacgtccgcttgtgccctctgccattagtcctcacgtatagttattgtttcattataagtgcgtatgagtttcctcacactcactctatcttagaggctttttccgcacttgagcgccatttcacaaaaataatatcttttttatcgttcgaccgtgttgtaaatcacacccaatcgtccggttcgatgccttgcggaccaacgtattcgccgttcggcacatagcttggctcgcccttatcttccagtttggcgtcggcgaacatcatgacgtcacgtccgaatgtccagtcgccctgaatggaaaccgagttggctgcggccaaagatggcacggcgtaggggaaccgttcgtcgaaatcgtggatgttcttgtagtatcgcggatcaagttcgacgttcgggaagatgtaattgccgtcttccatctcatacgtgtccgtcaggtggaatcgatcggaacgcataatgaacaaatcattggtggttttcaccggaaggaagcgcatacgatccacttggacgcagatagaaccgttgaacagaccgattgcggcgcccatggcggtttccagctgaatcacctgttcggaatccgggtccgtgggattcacggtctttttgttacgaatcaccggcaacggcaacacaccatcgcattcggcgagcttgtctttcaaagcgtcgatgcgaacccagatcgagttggtgttgaagtaaggatgcttggtgatgtcttgggccgcttccttatcgtccggatggacctggctcatttcacgcagtattaggcgaccagtagccttgtctcgcacaatatggccgcccttgcgatcggccttggtgcggatggccacttcagccataaacggggcacctgtgttttcgaagtgctgggccaacgtacgcgaggggcgcgcaccgagattgtcggaattggagatgaacagatacttgaagccgcgctcctccaatacgtcaagcagaccagactcccagatggtggagaacaggtcgccgtggccgggcgggcaccattccagctccgggttcgcagggtagctcacaggttcgccggtggcggccacgagcttgggttcctgatgctggatgatttccatcggcacgtcatgctgactgaacttgcgatgatgcttgagcaccttcatcgtgtccgccgaagtgtggaaggagttcatgaacgtcagcggcagttcgacgttcaggcgtgtgcgagcggtaagcacctgaccgatgatgatgtcgatgaagcgcatctgcttggccttgtgcctacgcaccggcaacagcgatttggccttgtctaatcccatggaggtgcccagaccgccattgagcttgaggaatgcggtcttggcgaaggcgtccacggccttgtcgtggttgatggtctcatagacgtcgtggaagctgggcacgtggccaagcggctcgatgtcgtcctcgcgaatccagctggaggcttcttcatggcgccatacgtcatacaaatggtggaactggttgatggcggtttcgctcatgccatgctcgcgcatcttggcggccgaaagctcgaaagtctcatccacttcgggggtgtttacggtttcttcgggggtgtccgaggtaacggcgtcggtgtcgtcagcggcggcgatatccagttgggccttatcgtttatttctgtcaattcgggtccctttcgtcaaatcaataggaaccagtctagcccctgtttggggcaaacgcatacgacgggggtgcggaggcggtgaattgtcggtgataattcattacgaatggcttacaaaggtaagtccgtcgtcatgttgtctcatattgtctgaaaacggaaaaaccccggaagacaaccactcaaaagtggcggaattccggggctaatcggtcgggccggcgggatttgaacccgcgaccccttgacccccagtcaagtgcgctaccaaactgcgctacggcccgatggtgcaaaagcaccgagtagataatttaccagatatttgaaatctggcaaattacgcgcgtgtcacttccgcttcttcttctcgcggatgttcacggagatctgaatcggcgtgccttcgaagccgaattcctcgcgcagggaacgctcgatgtagcggcggtagccgtgctcgaggaagccggtggcgaagatcacgaaacgcggcgggcgcgtggatgcctgcgtggcgaagaggattcgcggctgcttgccaccacgcaacgggtgcgggtgagcggcctgaattttgccgaggaaggcgttgagcttgcctgtaggaatacgctgatcccaggattccaaggccttatccatggctcgcgtcagacggttggtgtgccagccggtcttggcggacaggttcacacgctcggcccacatcacacggtcgaattcggtgttccacaggcgttcgagacgctgcttgtcgaactcgtccatcgcgtcccacttattgaacacgagcacaatcgcacggcccgcatccacggcggtggacatgaccttcaaatcctgatcggataccggctgcgaagcatcaaacaggatcagcgccaattcacagcgctcgatggcggcctgcgtgcgcagagaggaataatattccgcgcctgtgagcttgtgctggcggcgcttgatgccggccgtgtcgatgaacagccagtcctcgccatcgatgttgacgatttcgtcgacggggtcgcgcgtagtgccggccaaatcgttgaccacggcacgttcttcgcgcgccagctgattgagcagagacgacttgcccacgttcgggcggcccaccagagccacgcggcgcaggccggaaggcgtgaggtagccggaagtcttctcggcctgcttgagcttgtcgagcgcgacgtccagcaggtcgcccactcccctgccgtgcatggcggaaatcgagtatggttcgccgaggccgagcttccagaattcggcggcaagatattcgctggcctggtcgtcgatcttgttgacggccagcacgaccggcttgccggcggcacgcagcatcttgacgatgcgctcatcggtggtggtcatgcccacttgaccatcgacaacgaataccacagcatcggccaaggtcacggcaacctgtgcctgtgaggcgatggcggattcaatgccttccacgtcggcttcccagccgcccgtgtccaccagcttgaagtcagtgccggcccattccgcgtcatagctcacacggtctcgcgtaacgcccggcgtgtcttccacaacggcggcacggcggccgaggatacggttgaccagggatgatttgcccacgttcggacggcctacaacagccagcacacccaccggcttggggccggccttgcgcgcgccttccgtgaaaccgcggccggaaatcagatcctcatcgccttcgtccagctcatagccttcgagattggcggcatactgctcgtactcctggttctcgatggcgtcctcgaccagaccgatgagcagatcgagcgtgtgggcgaagtccaaatcggaattgtcgatggtagtaacgccatcggcggcggtcaggaagctggtgaccttggaatcggccttgtcgcgcgcagccacatcctcagcacccacgcccttgacggcttggccggtgcgacgggcctgacggacctcctcacgggcggtcagcagcacgcgcacctcggcgtccggggacaccacggtggtgatatcgcggccctcggccacgatgcccaaacccccggagaaggagtcggccgacgcttcgcgggcgatgtaggcgcgctgggcggcgatgagcacgttgcgcaccgggatgacgttcgacaccttggagacatggctggagacttcggaggaacgaatggcctcggagatgtcctcgtcgtcggcgaatacgcgggggttgtccgggtccacggagatatcgaaatggtcgccggtgaagaactcgcccaccgcttcggtgatgacacgctcatccacggtttcggcgtccagatcgatgccctgcttcagacaccaccaagcgcaggcacgatacatcgcgcccgtgtcaaggtaagcgtatccgaaatacttggccagcgccttggacgtggacgacttgcccacgccggcggggccgtcgatggcaacgcgaatcacagaccaacctccttggacagcgaacggacttccgtctgggacagcacgcggtaggaaccgggcttcaaatcaccgagcttgatcgggccgatctgggtgcgcaccaagcgcttgaccgggaagccgattgagccgaagatacgtcgcacgatgcggttcttgccggagtgcagcacgaccttgaccatcgtgtggtcacgcgaggagtcgatgatcgcgcagtggtcgagcttgatccagccgtcgtcgagctgcacgccggtggtcacgagtcgacggcacacggtgccggagatcttgccttccagcgtggcgacgtaggtcttctcgacctcgtacttggggtgcatgacgtgctgcgagagctcgccgtcgttcgtcatgaggatcagaccctcggaatcgtagtcgagacggcccatgtggaagatgcgctcgtacttgtcgcccacgatgtcgcgcaacgtgtagcggcctttcgggtcgtccatggcggagagcaccttgcggggcttgttcagcgccagagtgacgtggttcggattgacgcgtacgcgcgaaccgtctacgcgcacctgctgcttatgagggtcaacgcgagttccgagctcggtgaccagttcaccgtcgacctcgacacggccttcggtgatcatgtcctcgcacttgcggcgggacccgaatcccgcttgggcaagcagcttctggagtcgaatggaattggaatcgtcttgcgctttcgcagcgcgggaatatgcgtttggcatcgttctcccaacgtggccggacagattctgtcatcgcagagactgtcgatttgtatacatacttcagagttggcggactggaatcccagccaattccgacctatatatcataccgcaacgtaggactgctgctagactggcaaccgtttgtgcgggttcgcccgtcttccaacagatgaaaaggaatgaacaatcatggaagaaaccaatcagcagccgctggctctgcgcgtgtgcgccgaattggccggcagcttcctgctgtgctttgccatttacgccttctccacatggggttcggccgtgtatggcatcaatatcgtgttctttgcgttggctaccggcttggcatatgccgcagtcaccgccatcttctcccgcgtgtccggtggccagctgaatccggccatcaccgtagcctccgtgctggtttccaagacgaaaatcctggatggcatcctctatgtgatcgctcaggtcatcggtgccatcgccgccggcttcgccgtggtcaagctgctgcccacatccgagcaggtagctgccaaagtgtggctgactccggccgttaacggtttcgaaaacggctccgtgtcttactcgctgctgacccagtatggcattacgttctcgattacgctggcgattgtcgtcgaggtcgttgcctctctgattgtcgttgccaccgccatgtcttctctgggtgatcacggcgagtcctcggaacgtcatgtcattgccatgggtcttgcctatggtctggccaccgccatcagctacccggttaccggtgctggtctcaatcccgcccgttccaccggtatcgcactggccgcgatgaatgagggtcttacgcaaaatccgctgcagcagctgtgggtattctggattagcccggtcttggccgccgctgtggtggcgttggtcatgatcatcgcgcagatgatgaccactcccaaagtgccggctgccgccgatcttccgcagacggatgccgatgcaaacgcggacacgctcgacgatggcgaattcttcgatcaggccgcctcgtctgatggcgattcagcggaaaaagatgttgccgaagagtccaaagaagctgaagtaggtaatcagcaggccgattcccaaggcgatgccgatgaaggagtcgaacgccactgagcgcactttccatgggcttttgtcctgaagaatcaggcgaacaagcccggtgatgatggccgtcacggcaagtatgaccgtggcggccatcgtatatccgaaagcaaccagcagtgtgatgacggcgacgacgccgagtacgcaccattcaaaccatggcttgccctcatgtgcttcggatacatagggatggttgtgcatgttgcgattccttctgtcgaacggttacgtgaccacaatagcaggcgaatagcaaaaggtgggattccgcttggacccgttgacgggtcaagcggaatcccacctttgtgcgttttggctgagcttctcccctcagagagtcccgatcagtggaagaagtggcgggtgccggtgaggtacatggtcacgccggccttcttggccgcttcgatgacctcctcatcgcggatggagccgccaggctgcacgatggccttgacgcccgcgtcgataagcacctgggcaccatcggcgaacgggaagaacgcatcggatgccgcgaccgcaccggtggcgcgatcggcaccatcggccagcgtgttggcgcgctcgacggccaaatggcaggagtccacgcggttgacttggcccatgccgatgccaaccgtggcctggtcgtgggccagcaggatggcgttggacttcacgcagcggattgcacgccatgcgaacacgaggtccttcagcgtgtcggcgtcggcggcctcgccggccacgagcttccaggcgtccggatcgtcgccgacggcgttgatcagatcagtgtcctgcacaagcaggccgccatcgatctggcggatggcctcgtggcccttcggcggctcggccaccttgaggatgcgcaggttcttcttcttggtctgcagcagttcgagcgcggccggctcatagtcgggggcgacgatgacttcggtgaaaatcgggcgcacgctttcggccatctcaagggtgaccttggagttgcaggcgatcacaccgccgtaggcgctcatcgggtcgcaggcgtgagccttcttgtgggcctcggccgcggtcgcgccgatggccagaccgcacggattgttgtgcttgactacggccacggcaatggcgggagccatatcccatacggtgcgccaggcggcgtccgcgtccacgtagttgttgtagctcatcggcttgccgccgagctgctcggcgtgggcgaaaccggtctggttgagcgggtcgatgtagagggcggcctgctggtgggagttctcgccgtagcgcagggtgtgcgcacgatcccaggtgcgggtgaactgggccgggaacttggcggaatcgacttcagtgccctgatcgtccttgtccacctcgacggcgtccagagaggccggcttgggccagtgcttggcggtccactcgttgatggtggcgtcataggcggcggtgtgcgcgaaggccttggcggcaagccacttgcgctcgtccaaggagaagccggtgccgtcggccacgcgggaggcgaccagtgcataatcggccgggtcggtgacgatggccacggtggcgtggttcttggccgcgccgcgcaccatggagggaccgccgatgtcgatcttctcgatggtatcggcctcgttggcgccggagcgcacggtgtcggcgaacgggtacaggttgacgaccaccaggtcgaacggcttgatgccgaactcctcgagctgcttggcgtgctcggggttggtcatatcagccagaatgccggcgtgaatgtacgggtgcagcgtcttgacgcggccgtcgaggcattcggggaatccggtgacatcggacacctcggttaccttgacgcccagttcggcaagcttcttggcggtcgaaccagtggaaacaacttcggtgccggccttcacgaacgcttccgcgagtacttcgatgccttccttatgaaagaccgagaccagtgctcgacgtatcggtcggttcgtgtttgtcatcctgttcctccttggattcttgtggttgtgacgctaggaaccgcgcctgacgaacggtggcggtcttcgaggtcgcggcggtggtgcgggaatccttgattctctcaaccaaccagattatcggaaaaacgagcgctgtgccaatcagcgcgagcagccacgccgcggtaagtcccagtgcggtcgaatgaccgacgactctggtggaggccatgacgtcgacgcctatgtgagcaagacgatgatcgccaagcgatccattggacagagcgaacagcaatgtggatgccagtgagatcagcatcgcgctcaggcagaatgccccggcggagtagatcagcgaaaccagtactgggccgcgggtggacgtattccgtatattcaacggcctgcaggcgaatccttgcggtaggaatacagccagcaggcccacgagcgcagcgatggcgagaggcgcgttcaaggcaacggtacgccatagttcgctgctgaccggttcgggcagaataccgaataccggaattgcaggaagctctttggattggccgagccataacgtgaaactggccaaatcaccgatggcgaatccgccgccgaagagccaggaaacagcccagagcatgacattgggtagccagatcagcatggcgacggtggtgagaattcgtgaaccggtttccatcccggacaattcgaacaacgatacgacagcggcatggttgcgtaccgaccatacgatgacggtaatcaatccaattgccaggtatatgcccagtatcgcgacggccaaggcgacgccgattttcaggcagtggcgtatgtccgccggcacctgcttgcgagtccagtccctgaatgctcgcattttggctgattccggtacggctgcgcataggaaaccgatcgagaatacgatggctgctttcagcaacaccagccactggtcatcgacaagacctaggtgcacggattgccggaatgcctcgttcaacccgagccaaacaatcaatccggcaacatacgcatgcggcccgtatgctttgattcgcatgatgagtgcattgatcagccatatcagcagtatggtcaacagcaatggcgtaatggtgagggtgaacgaatcggttctaaagcccgatccctcactcagaagcacaacggcctgtgtcagcgaggttgtgccgacggtgagattgtcgccgccctcttccatagagacgaccaataacatcagcgctgtatagcagcctaatgcaacggcatagatagccatggatgcgagggcgactatggctccccgcacccattggcgaatcacggctttcatcacgattggttggaaccgatcagtcgatgttggccttggcgagtacgtcacgcatgatttcagcggcctggcccggggtcttgcccacggggatgcccgccgcctcgagcgcgttcttcttgtcctgggcggtgcccttgcctccggagacgatggcgccggcgtggcccatctgcttgccttcgggggcggtaaaaccggcgatgtaggcgacaaccggcttggtcatgtgctccttggcccatgcggcggcgtcctgttcggcgaagccgccgatttcgccgatcatcatgacagccttggtgtcggggtcggcttcgaatgcctgcagggcttccagcagcgtcgtgccgacgatcgggtcgccgccggcgccgagacatgcggtgaagccgatatcggacaattcgcccatgagctggtaggtgagggtgccggatttggagaccagtccgagcgggccgcggccgacgatgccgtcggggatgatgcccagattgacgccggggttgccgagcgtgatgagaccagggcagttcggtccgatgatgcgcacgcccttcttgagcgccagttcgacgaagtatgcggaatcggccaccggaatgccttcagtgatgaccacgatgagttcgatgccggcttcgacggcttcgaccacggcggacttggcgaacttcggcggcacgaacaccacgctggccttggcgccggtggcttcacgtgcttcgccgcaggtggcgaacacggggatgtccgcgtcggcaccgttcttggcaccggggaaggtgacggatgtgccggccttgcgcgggttcacgccgccgacgatattggtgccggccttgagcatgcgagccgtatgggtcatgccctgatggccggtcatgccctggacgataacgggagcgccgtcttcgatgaacagcatcagcgaacctccttggactgggtcgcctcaccggcgagctgcgcggccttggctgccgcgccttccatggtttcggacacatggatattcgggttattggcggaggcgaggatatgcagaccctcggcggcggcgttgccatcgaagcgcacaacgatcggcttggaaccgccgagcttggcgaccgcttcgaggatgccgttggcgacttccacgcaggaggtgatgccgccatagacattgatgaacacggattcgacctgagggtcggacagtacgatctccaggctttcggccatgacggctgcggaggcgccgccgccgatgtccaggaagttggcgggcttgatgttggtgccctgttcctcgccagcgccggagacggcatccagggaactcatgacgagtcctgcgccgttgccgatcacaccgacctcgccgtgcaggtgcacgtagtgcaggccgtgttcgcgggcacgctgctcgaaggggtcgggaacgatgggatccacgaaacgcgcccagccgtcatggcggaaggaggcgttgtcatccaaggagatcttggcgtccaaggcgctcagctgcttggtggattcgtcatccgggtcgccgatcttggcgagcggattgatttccacgagcgtggcatcgttgtctttgaagcagcgccacatcttgagcagaatctgtgcggcctgatcgacgtccgcgtggtagaagccgatgctctgcgccatttcggtggcagcggccaagtcgaaatcgccgagcgcatcgatgtgcaggcgcttgacggcctccggatgttccttggcgatttcctcgacttcggtgccgccgttggcggtggccagcacatcgaagtcacgtgaggtacggtccacggagatggacacgtagtattcgtgcaggatgttcttggcttcggccacaagcacgccggaaaccttgtgcccgtggatggtcatcggcaggatggactcggattcaagaatcgcctcgtcgcggttatgggcgatcttgacgccgccggcctgaccacgatgaccgatcttgacctgcgccttgatcacgcagggatagccgattttgtccgccgcttcggcgacttcatgggagttctgggcaaagatggcgtccggggtgggaatgttctgttcctcgagcagctgacgcgcctggtattcgtaaagatccatcgatccttccctgactatgtaattggtccggcatgtaactgtacatagtacatgccggaccttgaaaactgactgtacgttgggtgagacgaaatctcaggccggcatcgcgatcagcgagctgctgggcttgccgccgagcttatccagaccgtcgaggccatcgagccgcatcacgaaactgaagcccgccacggtgccaccggccttttcgataaggtcggtggcggctttggcggtgccgcccgtggcgatgaggtcatcgacgatgagcactcgctcccccgcctgtacggcgtcggtttcgatttcgacactggccgtgccgtattcgaggtcataggattcaccgatggtttcaggcggcaacttgccggccttacgcacggcgatgaaacccttgcccaaatgggcggccatggccgggccgaacaggaacccgcgcgattcgagaccggcaatggagtcgaattcgctcggggacaccggcagagcctcttcaagtgctttgagcagaatcttcaaacccttggggtcggcgagcactggcatgaaatcacgaaagatgatgccttccttgggaaaccccggtacggaacgcaccaaggacaccagatattcggcgtcctgttgccctaccttgctcaatgcgtcgatggtgatgtccgactgtgccatagtgctcgccccttttatgcttttgcgatgcgatacgcggatggtgctaccggatcgaacagcttacttcgtcttggtttcgttgtcgtcaccggtctcgtcagcggtatcttcctcggacacgacggacgcctcgatcggaacctgaccagcctcatcgttagccggagcctcggtgtcttcgtcgggcagcgggttgccgttctcgtcgacctcatcatcggacacataggccgggcggatgtactcacgggcgatggcattgaaaccgaaacgcagcttggagccttcggagtcgatgacaatctcctcatactgctcgtcgacttcgacgaccttgccgatcacctgaccaatggtgatgacctcggtgccgggctgcagattgcgacggaagtcctgcttctcctgctgttgctgcttggccttcttggactgccaccacatcatgccgccgaacacgacgacgatcacgatgagcataatgtactgttccacgaaacaactccttcaaacgagcgacattgacgaaacgccgccgagtgtgcaaacaggagaaagtctagaagagcttgctgacatcatctttgggcgtaatccccaaatgttgccatgccttctcggtagccacacggcctttgggcgtgcgaatcataaaaccttcgcgcacgagatacggctcgcacacggtttccacggtttccgattcctcgcccaccatggccgccagattgttcaggcccacgggtccaccgttgaagttgcgcacgatggcattgagcacggcgatgtccagccggtcgaggccttcggagtcgatctggtacagggccagcgcctccttgacgtcgtccggccgcaccacaatcaggtcgtggacgatggcccagtcgcgtacacggcgtagcaatcggttggcgatacgcggcgtgccgcgcgaacgcaacgcaagctcatgagcggaacccgcatcaaggtttacgcccagtacgttggccgaacgttcgatgagcttttccagctcctcgtgcggatagaagtcgagatgtgcggtgaagccgaagcgtgcgcgcaacgggcttggcagcataccttcgcgcgtggtggcaccgatgacggtgaatcgcggcagggtcagcgggatggagcttgcgcccgggcctttgccgaccatcacatcgacgcggaagtcctccatcgcgatatacagcagctcctcggcggcgcgcggcagacgatggatctcgtcgatgaacagcacttcgccgacgtcgagggagctcagaatcgaagcaagatcaccggcatgctgaaccgcagggccggaagtcacgcgaatcggcacttcaagctcattggcaacgatcatggccaacgtggttttgcccaagccaggagggccggcgagcagaatatggtccggtggcacatcgcgtttgcgggccgcgtccaggaacagttgcagctgggccttgagccgtggctgtccgataaagccttcgagaacatgggggcgcagctcctcgtcgctgaccggctcgttgccgatcggctgggaggagaccatgcgcagcgactcttcgttggcaccggtgttggaggtgccgtaatccgttgtctcgctcatcagcggcccctatccatcagcgccaaagccagacgtagcacacgcggcacatcgtcggtggcaagcggcgtgggaatgtcgttttcggcgcaagcctcggcaacggcctgctgggcgtcctgctgacgccagccaagcgaaatcagtccttcgacaacctgttccgtaccggtatccaccggagacttggatgttgccgcctgagcggaagcaccctcgatctgactcaaatcaatagagcccttaagctcgaggatgatcttctgtgcgcccttcttacccagccccggagccttggccagcgcggtggcgtcgttgtcggtgatggcgtgggccagctgactcggcgtcagtgtggagagtaacgattgggccactttaggcccaatgccggagaccttgatgagttgcaggaaggttttcttggcgtcccgatccaggaatccatgcagggtaatggcatcctgagagaggttcatataggtgaagacgcgggtgtcttgcccggcgtgcagacggctcaggtcggtggcggacatgcgcacttcgtagcccactcccccaacatcaatcaatgcggtatcggtttcgaccgattcaacccgcccggtcagcatgccgatcatacaggtactccttcaggactccaggattcaagactcgaacaactgttcgaaagtatactacatgcctcggtcgtggttgatgcggcggcgcgtggagttctgtgcggcctcagcccactggcgttgcgcggcggtcagatgttgttcgcgttcgccgccctgcaatgcgcctgccgggcgcagcgcatggcaaatggccaaagccaaggcatcggcggcatcggcgggagtcggcattttggtgaggttcaaaatacgtgtcaccatacgctccacctgaatcttctgcgcctgcccgttaccggtgatagccagcttggcttcggtaggcgtatgcaacgccacgggaatattgcgttgcgcggcggcgagcatggcgaggccggcggcttgtgcggtaccgagtacggtgttgcggttggattgggcgaacacacgctcgatagataccgcgtccggcgcgaatcggtccattttctcggacagaccgttgtagatggccagtagacgcagatcctgggtgatatccggtgaggaccgcaccacgtccacgtgaataaacgaaagccggcggtgctcgccggcttcgatcacgccgaccccgcaacgtgtgagcccggggtcgacgccaaggataatcacgaggattactcctcgtcgagctgggccatcacctcgtcggaagcggtccagttggagtagatgttctgcacatcgtcgaggtcatcgaggttgtcgatgagcttggacaccttgcgggcatcttcaaggctcaactcgacctcgttcttcggctgcatgacctggtcggcggaatcgtagtcgaagccggcttcctgcagagccttgcgcacggtgaacaggtcggacggaccggtcacaacggtgaacacttcaccgtcatcggtaacgtcctcggcaccggcttcggcggcggtttcgaacagcttgtcgaagtccacgccctcggacggcaccacaatctggcccttgcgctcgaagttgaaggacacggagccggaggtggccagagagccgttgcccttggtcagggtggaacggacttcggcggccgcacggttgcggttgtcggtcaggcattcgatgatgaggccaacgccggcaggagcgtagccctcgtagacgatgtcttcgtagttggcggcaccatcttcagcaccggcaccacgcttgacggcgcgagcgatgttgtcggccggcatggaggccttcttggccttgtagatggcatcgtacagggacgggttgccgtccgggtcgccgccgccgaggcgggcggcgatttcgatgttcttgatgagcttggcgaagagcttgccgcgcttggcgtcgatggcggccttcttgtgcttggtggtcgcccacttggaatgacctgacataatgctcctagcaattattgaaacggatgatgtcaaacgaaacgattgtaggccgttaatcagacatacccgtaatgtttccgatgattgtcttattgcgcgtaccgataaaaccggttgcgcgggtgccgcacccggtcaggcaagcggcaaatgatactgcggggccagctgttcgaatgcctgggcataggcgtctcgctggtcggacagcagaatcggcatggtacgcgtctgggcgacgatgggcatgaagttcgcatcgccattccaacgcggcaccacatgctggtgcaggtgcgcggcgactccggcacccgcgacctcgccctgattgatgccgatgttgtatccgtccggacgggagacggtctccatcaccttcatggcgagggtggtggccttctcgaattcgaacagttcggcatcgtcgagttcggtgatgaatccgacgtgacggtacgggcaaatcatgagatgcccgacattgtatgggtagaggttcatgatggcgaacacgtgcgtgccacgccaggcgatgaggccgtcttcgtcggattttttgggtccggcgcagaacgggcattccttcgtcttgggcttggttgggcgatcctcgctgttgcgcagcacataggtcatgcgctgcggagtccacagtcgttcgaccgtgtcctcctgaggcggaaagtccgccggattatcgacacgcacgtcagtcattttcgcaccctttcttgtctcccctcagagaggggagacagtaccattcacatcactcagccacagcagcgttgaagtcgtcggcggagttcacctggacgcgcttcttgatgacggtgagaatctgctcgcgagcagtgtccaccggcacaccgttgagctggctgccgtcgcggaagcggaagctgaccgcgttgttgttcatgtcttcctcaccgacgatgaggatgaacggcaccttggacttggaggcgttgcgaatcttcttgccgaagcgatcgtcggagtagtcgatctcgcaacggaccatctcatcttcaagggacttgacgaagccggccagatgcggggcaaactcgtcggcaaccggcacgccgagcacctgcacgggggccagccacgccgggaaggcacctgcgtagtgctcgagcagcacggcgaagaagcgttcgatggagccgaacagggcgcggtgaatcatcaccgggcgctggtgggtgccgtccttcgcgatgtactcgagctggaagcgctccggcaggttgaagtcgagctggatggtcgagacctgccaggtgcggccgatggcgtcgcgggcctgcacagagatcttcgggccgtagaaggcggcgccgcacggatcgtcgacgagctcgaggttggattccttggcgacctcggcgagcgtgttggtggcctcctcccagatctcgtcggagccgacgtacttgttcgggtccttggtggacagctccaagtagaagtcggtcaggccaaagtccttgagcaggttcagcacgaaggtgagcagactggtgagctcgtccttcatctgctcgcgggtgcagtagatgtgggagtcgtcctgggtgaggccgcgcacgcgggtcaggccgtggacctcgccggacttctcgtagcggtacacggtgccgaactcgaagaggcgcagcggcagctcgcggtaggagcgctggcgcgacttgaagatgaggttgtgcatcgggcagttcatcggcttgaggtagtagtcggcgcccggcttggtgatgttgccgtccgcgtccttctcctcgtcgaggtgcatgggcgggtacatgccgtccttgtaccagtgcaggtggccggaggtctcgtacaggccgcccttggtgatgtgcggggtctgcacgaagctgtagtggtgcttgcggtgcatctcacgggagtagtcctccatagcgttgatcacggcggcacccttcgggtggaacacggccaggccggggccaatttcatccgggaaggagaacaggtccatctcggcgccgagcttgcggtgatcgcgcttggcggcttcttccaggcgggtctggtaggccttgaggtcttccttggtggcccatgcggtgccgtagacgcgctgcatggtcgggttcttctcggaaccacgccagtaggcggcggcggaacgctcaatcttgaaggccttgatgtagcgggtgttcggcaggtgcgggccgcggcaaaggtccttccaaaccacattgccatcacggtctacgttgtcgtagaagctgagctccttttcggagatctcggtggcggcggccgggtcgaggtgtgcttccttgtcttcgatcagttcgatcttaaagggctggtcggcctcttccttcagagcctcttcctcggtcacggaacgacggcggaaggactgggaggacttgatgatgcgctgcatgcgcttctcgatgtccttgaggtcgttcggggtgaagggctggtcgacctggaagtcgtagtagaagccgtccttgatgacggggccgacgccgagcttggcgttcgggtagacttcctgcacggcctgggccatgacgtgggtggccgagtgacgcatgattgcgaggccgtcttcggagtcgagggcgatggggtcgacggtgtcgccatcgttcagcggcgtgtacaggtcacggttctcgccgttgatcttgaccgcgatgatgttcttgtcttccgcgaacagttctacgccggtggtggttgcttccacctccttcgcttcgccgttgacggttatggagatggtagcttgcgccatgatttgtcctttgctatcggggcccgcggtactaatgtgcaggcctggactggttaatcaacgtaggacacgataggttgggcgtgcgacaaataccaccagcatctgaaccaatacgaaaaaacctcgccgaagcgaggtttcgttgtggagcggacaacgggactcgaacccgcggtctcaaccttggcaaggttgcgctttaccaactaagctatgtccgcaaaggaatccgccgtgagaagcggaatccagtgggcgatgtaggaatcgaacctacgaccccttcggtgtgaacgaagtgcgctagccgctgcgccaatcgcccgaatattcggttcttcagttatatccagtcgaattgcttcgactttcgtgggcgatacaagattcgaacttgtgaccccttccgtgtcagggaagtgcgctaccactgcgccaaccgcccgggtcatatttcattccattgaattgcttcgctggtctgagaggtgggtacgagagtcgaactcgtctatacggctttgcaggccgctgcctaaccgcttggctaacccaccgtaaggtctgtcaactcacggacctagagcggacaacgggactcgaacccgcggtctcaaccttggcaaggttgcgctttaccaactaagctatgtccgcgtgtgtttccttggcgaggtctccctgccgaagcacgagtgtttactatacacacatgcgtgtagttcgtccagctgcggcgtgtcgcctgtaattgcatactctcgcttatggctaaagcgtgcgcttcgggcaatgaactccagttactctagaggtatgagtgaagcagcgaaggacaccggcgcagtattgatcgccgcattcgagggatggaatgatgcctgtcaggcagcaacgaacgtggtgcgccatctggtcaagcgatatgagtcccgcgagattcgtcatattaaatgtgatgatttctatgactatcaggttgcccgtcctatgctgtgccatgtttcgggtcgcatcaatcttatctggccacagaccacgttctacgacatcacgttggacgcaggcaagcgtatctatgcgcagattgcccctgaaccgaactatcggtggaaggaatactgtagccagagtctggccattgccgatgagctggatgtcaatcggatcattacgttaggctcgatgttctccgattgcccgcatacccgtccgttgcccatcgccgtcagcgacggagactgtcaatgcgaaggagaccggtcgtataacggcccggtgggcattcctactgttctggatgtagctgccgcacaacaaggatttgctcattcctcgatgtgggtgtccatcccccaatacttgggcagcgacgaatgctctgccggcactatacgattgctggatgcgttgggcaagtatatcggcttcatcttcgatacggcagacctgaagcagaaagccgagcagtggaaggcgcaggcctcgatactggttcgttgcaatgaccagcttcatgattatgtggagcatttggagcacgactacgacttgcagcagaaagccgaggcggaggcttcattgggagcgccccaggctgaacaactagtcaaagaagcggaagcgtttctacgccagatgggcaattagccctatatacacaatactcccgctgacgggagctggctcgcgtagcgagactgagggtggttctgctggcatattccagtgaccaccctcagtcagcttcgctgacagctcccgccggcgggagcaccattaatattgagtcgcctatcgacccgtcttatgccgcagccaccacggagggatcgatggccggcagcacgcccacaatcagcagcaaggcgacgaccacagccaaaccgatgcggtagatggcgaaggccttataggagaagttcgatacgaacttcaggaatccgatgatcacgatgtagccgagtacgaagctgatgaccatggctacgagggtcggcccccagccggggaacatcgcatcggttttgtagttcttcacggccttgatggcttcgagcaaacctgagccgaacaccgcggggatggccatcaggaagctcagacgcacagcggcctcacgcgtgtagcccagtgcgcgaccgacggtgatggtgccgccggagcgggacacaccaggaatcagcgccatggactggcccaaaccgaagaggaatgcatcacgatacgtcatatcattcatggttttgttctggcgagccttggcatccaccatccacagcagaatgccgaataccaacagcacggttaccgtaatccacaggttgcgcaacgaggtttcgatgacgttctgcagagtgaagccgaggataataatcggaatcgagccgacgataatgttccagccgagtgtggcgtaattgtcgccgcggcccatgcgggccttccaatccttgccgttcttgccgaacaggcagctgaaccagtgagtaaggatattgatgatgtcgtgacggaaatacagaatcaccgcaagttcggtgccgatttggatgatggcggtaaacgccgcaccgggatcagagcccagcatcaaatcgccgaaaatacggatatgcgcgctggaggacaccgggagatattcggtcagcgcctgaacgatgccgagaatgatcgcttggaaaaaattcataacccctcgtgatttctaagtatttgatgtgttatgacgatgaacaccctacccaagggggtgtagaacaacactaagaatcggtaacatccacggcttctacaatgaaagtggatatagtacgtaagcgacgaagggagcattatggccacgtatcgcaaaagcagggcattcgcaccggaaggattcttcgaatgcgagggtcgaggactcgaatggttgggagcggctcatgcgcaaggcggcccgcgcgtggtgcaggtatacggctggggcaaggattatctggatatcgaacgtgtgggtagcgcgtcccccacgcctcaggcggcacgagcttttggcgcggctctggcccgtatgcatgatgcgggtgccaagtatttcgggtctgcgcctgacggatataacggcacatgctatttcggaccattgcaggacccggtgaaaatggataccggcgagtggaccgacccgatcagctatttcgctgatggacgtctgcgcccgatggtcaaccttggtgtgaaacgtggcgagctggataagcgcgatgtcgagttgactgagcgtgtgattgaagcgctgccggatctgatgggccgcgccgcggccgacaagccggcgcgcatccacggtgatctgtggagcggcaatgtgatgtggaccgccgattccgggcagtccgaggccgtgctcatcgacccggcggcacatggcggtcatcgcgaggaggatctggctatgctgcacctgttcggtatgagctatctgagcgaaatcaccgagggctaccagtccgtacatccattgaaggccggatggcaggagcgcatcacgctctggcagctctaccccatcgccggccactgcgtcttcttcggcggcggctacgtcaacgaataccgctccatgtgccgctccctgctgaagtaacagacttggctcccctcagagggggagccaagaacgcatccgctctcagctcagtgcgtccttcaacttgcagaagaaccaccattcacgggaatggcgttattccaacgtttctgagggtttcatacgggctccaaaacgcttttgcccacattttgcccacatttttccatgcccgtctccacctgcactgcggcgtcgagcatacgggccacatccatcaaatcggaatcaaacaaatcggcgtacacatccaacgtcatcgaggcgttcttatgtccgagcatccgctgcagcgccttgacgttcgccccggcgtgcacggccagcgaggcggcggtgtggcgcaggtcatgaggcgtgggccattcctccttcggccagcccaggcgcaccagcgcgtgatgccaccagcctgtggtcttcgccgtgctctgcttcatgataggaccaccacgcaggtcacggaacaccctttcgtccggttcgcgttccccgcatatcggtttcagcgcttccatgacgatgagaggcatgggcacgtcgcgttcctcgctgttcttcggagtgtcctcgacccatcgtgccccgacgtacacgaggttgccgcccacatgcagcactccccgaccgaagtccaggtcacgggccttcaacgccgccgcctcgccccagcgcaacccgcagaagcccaatgtcagcacgagcgcccgccgctccgctcccagatgctttcccctggcgcattcgtcggcgaatgcgagcagccgggatatggtcaggtacacgcgacggctcttgcgcctcggcagcttggggagttcaacgttttcacaggggttgtcgagtatgagcctgtcccgcacggccatgcggcagatgccgagcatggtctggtacgggcgtctcacggatggagcacccgagttctcgatgatgtcgctgatccatgcctggacttcggcgcgggtgacggtgccgatccgacggtcggcccatcgagcctcgcagtggagcctccatgcgtcggtggcgttgatccgcgtggtttccttccaaaagggccatttctccttcagccattgctcgtagaggtctccaacgcgtcgtttgccgtcctccgggtcaacatagctgttggtggccttggctatggtgacgtgttcggccgcccagttctccgcgtcgatcttgcgcttgaatccacgcttgtcggtctgggcgccatccggtttgcggtagcggacgcgatagcgcgtttcgcctttgctggtcttgtatctggtgacgttcgccatgattttcactcgcttgcactgtttttccggttttaacgtgttttaaccggttttgatgtgttttaatgggatttgacaaggggaagggaaacacataagctatccccttacgccaaaatcgaaaggaggcggccatgaccatgacggataccggcgtgaagccaataccggcgtacgcgccgtccgaggacggcaagccacgcaacgccgtggacgagaaatggatgcgactgcaccgcgcgatgatgaaccgtccggcacgactcgcgaagaaggcgcagaagattgagaatagcgatcgtcactagtcgcctgtgcgactccggcgaccagctcgcattgcgccgcttcgtctgctgcgagccgaacggcccggagtacgcgatggacgtgcaacgctatatccgcggactccgcgtcaaggacgagccgggaatgtaccggatggtcctccagtacggggaaaccccgaacgctcccatcgtcggcttctgcgagttcggatacgaccccgccgccctggaatccagtggttacgcgatatcgttcatcgccaccgcgttgagcgaacgcggccggcatctcggtgcgatactgttggactgcgcgctgcgatggatggcgaacgacgccgccagacacgggcgcaccccgtacgtgcttacacaaatcgacccccggaacgaggccagcgttcaccttttctccggcgcgggcttcgagaacgaggggcgggatgagaacgaccccgaattcgacatctggtcgaaggaattcgaaccgctcgccacggacagactctacttctactcccccatcatgattgacgaggacgataagaactgacatttcgggtatggcttcgccccgtgtaggatagttggcgaagcgtcctcctttccaataagcaagctggtcgatgtttcacacgccctgccgatgttccagatcgacagggcaattctttttctatcgattgaccacgtaattcgggtcggtgactatataggagtagttgtcctccccgccggtgccggaatacacgtctccgacgtcgcggaatgctatggcaaccatcttcgcgtccaatggaacctggaacggataggtgaccgtgctggtcaatcccggctggagctgggcgttgcactcggggttgccttcgacctgatacagattcttgatgggcgtgtatttctggttcttcgagttcaacgcgactatctcataggggtagctgcaggtgatgtccatcggactgctggtgttgttcgtgacctccaccttggccacccagtacttggtgttcgcgtccggtgtctttggcccgtattggccgttgctgcatccgtcgccgcatgtgtcgaagctgatggtgggctgttcgccggcttcgaggaccttcatttcgacgccgccgctgacggcggtctcccccgtgcccgaagcgtcggtgttggatcccgtgtcgttgggatcttcctgggggttgagtttttcgttcgcgtcggctagctgcgctttgacggagtccaatgatgtattgaggtcttggatgtccgacttctgctggttgatgatgggcgtggcgtacaggtacatgcctccgagtccgccggctagtcccacgaccagtcctatggctgcggcgatggcgatgacggccgccgttgggagcttcttcttcggtgccggcgttggcgcggatggtgctgctgcgggctggctatcctgcgttgccggcggctgctgtgcctgcatgggggttggctcggtcacggttctcttctttcttctaggcggccacactgtcgtgcagccagttcttgtaatcttctatgacttgtacggtcacgttgagttcggcggccatctgataggggttgccgtcgtacattcgttccgccaaggcgtattcggctgagttgatgagcagcatggcggtctcgcgccggcagcgccgctcgtttttgccgccgaggcagccgtgggtggtgtcgtcgccatgtcgccagtggacgagctcgtgcaccagggcgcagcgtttgcgcgtgtaggtgatgcgccggtcgatgagcacggtgttcgtggacaggcagtagacgccgtccaatttgccgggcagacgggcgctggccacgtgcaggtcgggcgcgacctgatagagggccatgcgcatctgcccgtagctcatgcgcggcgacaacgggagcggatccgtcatgcggggtcgtctccatcgccatcaaacttgtgctcgtcctcataggcggcgatatcgagatcgccgcgcctgagcttattgagagtctcagccacacgagactgctcgtcatcatgagttgttaaatcggtggagttgctatcctgcaaagcaggaaaaccaattggcccatcgttaatcatatggtcaatgcacaaatcaatttcttctatgactccacgggtctcccgtcctcgcttttgcggcgaagaattctgcccagcgcgtcgcgcagtctcctcatcaagaaaacgaccatatcgcagaagacagattgcggcaaaggcaggtgctgtaataccgactttgtcagctgctctttgttcggataacgtgggagaatgatgagtcatctcattacgtatcttgcttggtccgttaagcgctgtcgatactagatattctgacacttttgccatgatgttcggaatagaattcagcaacgcctgattaagctgctgtatcaccggatcgtcagacatttttttgggcggaattcctaataattcaaaatgatttccattcagcgccttgcggagttcctctctactgatcgaaccccctccgtctagtttaatttctccttctccgggaaaaagatcggagagcacaagaggcttccccgtcagcgactccaacgacttgacaagaatcagcatgttgaacaatgaggctgcagaagcatttcttttcatgcccgaaatgaatcccggtgtccaagtcgctccatagcgtctcgcttcagtcgcaatttgatccaacgtcaagcctttggtagctctcattgaatctatataagcgtagatggcttcattaattctcatgttctcaatttaacaacacgacacgccaaaaggcaaaatacaagttgtcatattggaactctgtgctatcttgttaatcacgttctcataacgacaacttgtgaaaggaggtttcagtaatgccagcaattgccatgagcccgacactcagccccaaggaggtattcgagcactacgggctcaagcccaatcatctggcccagctgcgctaccagaagaaaggcccacgctacatccaggcgacgccgcgaacggttttgtaccgacaaagcgacatcgaggattggctgaccgccaacacggtggagaccgaggacagcaaggaaataaaaaaggcatccgccgctacggatgccgggatcaaatgaaagaaggttcaaatgaacagcaccattctaaccgacaacaaggaaatcgaaaccctcggccttccctcatggtggagcgacgacttcccctgcgtggcgacgttaatcaagaccgggttcaaggggcaccgtcagctgttcgcagctgacgtggatgtcctccccggcgtcggcttcgcgttctacgaagtccaatggctcagcaaagacgggtcttcctccgatggaccccttacgacaatcgttccattcaacaacatcgaaagcattgaacaggtagaaaccgtggaagcagaggacggtggtctcaagtgagcaacgcattgcagacccttcgtttcgaagatacggaggtcaccgcactggactgcaacaccgacgagccggtgttcgtcgccagccccatcgcgaagaaactcgcatacgagagcgcgaaggacatgttgcgcaatcttgactccgatgaaaagggtaagcacattgtgcccacccttggaggagaacaagaaatgagcgtcatcacgctgcccggcctgatccacgccttgaacaatcgccgccccggcgcagtcaaggacgaggccacgcgcaacatggtcatccggttccagcgttgggtgaaccacgaactagtgccgaccgtaatgcgcaccggcagatacgaggtgcagcgtccgcaacacctgcttgaggcggctcaccatgagcgcatgatgcaagtcgaactgttgaaggcttcgcagggcatcgtccacccggatttcctcgaagcgaagacgcgcatcgtgatcgcacgggaattgggggaactacctgagctcgacccgaagacccgccccctgtacacacaggactatctacgggagaagaatctgagcgccaagcagctgcgatcgaagagtggcacattcggcaagaagctcaaggccgcatatcgagagcgaaacggtcgagacccacaacgcgctgatctgacactgccgaacggtcacatcattcaggtctacgcctacacggaagaagatcgccccttgtttgaccgggcatgggatgagctcagtcagaaagcgggtgcgtgatggccggcgttctccctgagaaaaatcttcgtctatctctcacccaccctatcgtgtcggactcttacagacattccttccccatggaattggtatgtgatccgaacgatgaggccgacctgttcctgacggtgttcaaagcgaaggttcctatgttcgacttgtggttcgacctgacgtattccacgttcgacggggtgaccggttcgttctatcccgattggagcgaatggacgttcggtgacctgaaggaagcgaaggacgtattgcactcctatctggattccatcgatgttctccgcgttttttttgcggactacctgcgggtattcgagtgggcgtcgaccgtggactggcgcggcctgctcgccaagaagcgtggtgagtcatgtccaagcagatagaagcacaggacggttggcccattggcaaggtggcggaattcctgaatctttcgaagagcactctttacatctggtcttgctacgaccggtggggcgggaaatacccgccggccccgaagcgtatcggccgtcggctggtgtgggatccacgcgaggtcatcgactaccggaacaacaggtgcgccatcacccgcaaggagctggtctacggcgaataagggtttcccggattcgaaaccgggagaaaaaggaagggtgccggcgttgcactgtccaaggttctgcgccgacaccaacatcaccaatcacattgaaaggaagacaagtgatgtcaaacaacaagattagcggtatccacgccatcggcgtcgaggttccggaggacatgtcgctgaaggagctcatggagcagctcctgaatgatacggaggtcgaattggagaaggatttggacggggagacccgcaagcccgaaccacagtccgaggcggacaagtggcagcggtatgcggacatgctgggcgacctgttcgatgtggcgcatcagatcggctatgacgcctacatgcagggcgacctgaagatcatgcgcaaggtgttgcaggtcgagtccgacgtggttgatctggccggcatcgtgaccatggagaagtcgagggccgtgaaatgagcatcgaagcattacggcgtaaaaagcggcgtatgcgtcgcccgaagccgcgcctgacggacgggcagaaatcggccgtattactggctctcacgttcttcgagggttggctggtcggtttcgccggcacgcacagtcgcatccccagtccggtgggtacgccgcagtggatgataaccggctcgctcgcattggcggtcatcctgccgctcatgttcgtgggaatcctgttgaagtggggcgatgatggaacagccaagtgagttcactctttgtctgccgggcgacccggtgccgaaggggcgtccccgcgtctacaacgggcacgcgatgacgccgaaacgcaccgtcagggcggaggaacgcctgttcgccgaattccggttgaaatacccgcaggcgaaaccataccagtgcccggtcaggttggaggccgaattctggatgagccatcgcggccgtcccgacctcgacaacctcctgaaattggtgctcgattcactgaacggcgtcgcctacgcggatgacgcgcaggtcgtcgaaagccacgccagcaagcggatgcccgacctatgggtctacgggtcgaagggccgctaccggaagcgcaagagcggcgacccgtacacgtgttgcgggcatgagtacgagccgcacctctatatcagtatcaaaccgctccccgaatgggagccggaggaaaggagacaatcatgagcaagcctatcaacgagccgcgtatggtgcagcaggcgctggtgtcggacgaggatctgagtttcgaactggcggccctggtgccgacggcgaacggcatcacgaacgcggccagcacgttcatcgacaaagccaccaaactgttgctgtccgacaagatcatgctcaccgacgagcagcatacggccgtcacgtcggccatcgccatcgcccaactgaccgtcaaggaaggcgcggccatatcgaagctgctgcgcaacccggacgcttcggcggacatcatcgccggactgcgcctcacctccaaggacaggcatgatgcctgaccggcgtctctggatgccgcgttgcaggacatgcgggccgctcggcaagcccaccggactggacgaggcggtcacctgctgcaaccggcacacgaaccagaccaagcatcagacggcgtggtatcccacccacgcccaaatcatcgtgaaaggcacaccaaatgactgcgaatgacacgtcaaccattgaaaccacggaggccgtgaacccggacggggaattgcgccaaggattgttcgccgcgcaggcggcgcgcatcgtcgaactgcaggccgagatcgcgtcccgtcaggaggaggtcgacgagctgaaggcccgtatcctcgactcgcatccggtcggcacctaccaggccggcaacctgaaggtgcaggtgaagccgggcgcgcgccgcatcaacgccggcacgttcgagaaagcctatccggccaccaagtatcccggagcctaccagttgcggccgcgcccgctcagccagttggagaagctgctgtcggcggacgcggtggccgattacgcgatgagcggcaagcctatggtggtggtctcatgagcgcggaactgtccagcctgggcatcgcccagatcgtggaaagcgttatcgccgactacgacctgcgtgacgaggacggcaacgagctgaccgacgacctgtacgtcatccgttccgagcagctcgacgagctgggcctcaccgtcgccagacgcatccacaaggccatacgcgaactggaggcgcagggcaagaccggttttcccgtgcattcgatggccttcggcagcatgccggtaaccatcgcgaaggacggcgaccgcacctacacgctgcgcttcgacaattcggacgaggcggtggccatcacacggctcagccggaccgcactcacggacatcaagaaacagatcaacgagtttttgaaggaggtgaagaaccgtgagcatgaatgaggcggtattggccgtcgcacaagcccagcagcagggtgatgcgataccagtggacacaccgcccatgacccagtcggcacccggcatgggcaagccgccagtcacgccgaaaacacgggtggacacgatggaggaacccaggttatggccggagatccgccagctcatcgaggacgacatccagaacgctccacgcgaactgcaacgtgagataggcccatccgaactgggaacggactgcgtgcactgtctcgcagccaaactggcgggctggccggagcgacgctccccgggctggctgccgttcatcggcacatgcgtgcacgcgcatttcgagaccatgttccgagagctgaacggggagccggcggcccagttcccgtacacgagcgaggacaacgtgcactgtctcgcggaacggtggcgcccggagtaccgggtcaccgtaggccgattgcagggcctccacggcggctacgacgtcaccggatcgatcgacctctgggatcgcaaaacccatagcaccatcgattggaagatcgtcggcaacaccacggtcacgaaggtcaaggcgcacggccccagccagcagtatcgggtgcaggcctcgctctacggcatgggactgcagaacgagggcgagcgggtggaacgcaactgcatctacttcctgccccgcaacaagacctcgttgggtgacgcattgccatgggagaccaggttcgacacggagcccggcagatgggcgttggcccgagcccaactgctcgtcaacctcatggacatcatcgaacaggcggacggcgtggaggtgcgcgacagttggataaagcaactgcccgcggctggccccgacaagtgcttctcatgcaagggccgcgtgtggccggacatgagcgcgctccccgagttcgacgagaagccgtggccggacgtgcccgataaatggctccagctcatcccattgattgaacctgaataccagttcaccgaataacgaaaggaaaacgattatgttcggtcagcaaccacagcaacagtatggctacccccagcaggggtacggctatcagccgcagcagcgtcagcccgcccagttgagctcgctcgacgaactgctcgccggcaacagcgccaaagcctacttcggcgcgaacagccagccgggggacacggtgaccggcgtcatcgagaaaatcgagaccacacaggtcaacgacttccagaccaagcagccggcgttctggaacgacgggcgtccgaaagagcagatccacgtcatcatccagacccaactgcgcgacccgagcgtggaggacgacgacggccgccgctcactctgggtcaaaggttggggaatccagttgaaggcgtttcgcgatgcctgccgtcaggcgggcgtgaagatcccgaagccgggcgacaccatcacggaacggttcgtgggtctcggccagcggggcgacgcgccccaaccgccgaaggtgttcgaattccacatcgaacccgcgtccagcgtcaacagtctcgtcaacggaagccaaccccggcagcctgtccagcagggctcccagcagcctcccgtgcagcagtcccagcaagactacccgcagcagcagtacgctccccagcagcccacgcagaccccgaatcaggggtatcagcagcctccggtcgacccatggaacccgccgacgcagcagcagccgcagcaacccgctcagccggtgcagctcggccagccgcagcagccgcaggctgatccgatgaaggtcaaccagttgaaggcggcgggcaagtccccgcaggagatcgccagactgttgggcgtgcctgtcgaggcggtcacggccgtcaccgaccaggcgcagccgcagaaccacggaggttcggaacagcaattggaaaccggtgaattctgatggacgagctttttgaagtatatgcagaaccagcagaagcagctggccacgcagatcagcgaggtcgacctgtgtcccgaaggtctgtcgcccgtcagtatcgagctgctttcatcgaagctcgtgctcgcaggctggcataacaccaaggactcggataaaggctgagtcccgtattgccgtcgccgtatccaagcggccggccctgttgcgacgacgggcacggcaccacacacattttcacactacgtcaaagggagtttcgaagatgaccgacatctacggatacacggcagccgcacccctgtaccgtgcggctggatggatgcaggtcatccccctgcccgagggacgcaagaccccgccacccgctggtttcacgggacgcagccgcaaacccgtcaccgacgaacaaatacagttgtggagccaagccaacccgaacgcgaacacgggcatcgtcataccagaaggcgtgctcgtgttggacatcgacgcggagcagggccatcaggtcaaggcggacggggcgaaaggcatcagcgaactctctcaggaactgggcatgcttccggccacgtggagcagcacggcgcacggcatcgactcgccggcacgccacctgttctacaaggtgcccgaaggcctcgcgtggaagggcggcgccatcgagggcgtcgacatcctgcaacccggccaccggtattccgtcgtatggccaagcatccacccctccggcgaaatgtactgttggtacacacccagcggctcgaccaccagccagatcccccatatcagcgatctggctaccctgccgtggaaatgggtggattatctgcgcaaaccggagcatacgacgccgagaccaacttctaataccctgatttctcccgaaaccggcacatacgacgcccgcatgtgcaaggccatcaacacgtttttacacaaaacactgtcaaacccggccagcaaaggctcaaggcacgacaccaccctgcaggccgtatgggcgctcgtcaacttcgcgcaggaaggccaccggggcgcgctcgacgccatcagccagctcaaaccacgattcatccaagaggtcgcccccgaccgtcagggcaaggaacgcgaggccgcacgcgaatgggccagcattctcagcggcgcgatggagaaggtcaacggcgtacaagcgcacgcggacccatgcgggcagtcgaagatagaacgcatgacgcccggcgagttcaacgaactcacccaaaacacgattgcgaatcaaatgagggaaagttatccgcaagcagttcaaaacactgaaacaatgccggttcaagccggttcaacacccgtcgcgccggttcaaaacggttccacggaaagtcacgaggcaaacaagaccgcctcccccagctggcaattcgaagacctcgcccagttggcatccggcattgaactgcctcccacccccaccgtgttccagcgcgaggacgggcaaggattgttctaccgtggcgcggtcaacgacctgcacggcgaacccggctgcggcaaaagcatgatcgcccaaatcgccaccgcgcaggaattgaaggcagaccgtgacgtcatctacatcgactacgaggattccgccagaaacgtcgtcaagcgtctcctgctgctcggcgtgaccggcgaacagatcgtgcagcatttacactacgtgcggcccagcgccaagccgagcagccccaccagcctcgacggctggaaggaaaccctcgactacgcggacacggccacgctggccatcatcgacggcgtcaccagctgcctcgcctacgccggcctcgacagcaacagcggtgacgacatcgccgcctggtacaacaccatgccacgactcatcagcgcctgtgggccagcagtcgtactcatcgaccacgtcgtcaagtccaaagacaaccggggacgctacgcgggcggcagcatgcagaaactcgcactcatcgacggcatcagctactcggtggacatgaccaaacccgtcggcaaaggagtgcgcggcaccatcgtcatcaaatcaggcaaggaccgcatcagcgagatcgaggagcattgcgccgtcagctggagcagcaacggcagccacctgcgcgaagccgcacgcatcgaaatcaacagcacggatccgaaactcatgcgcgtcaccatcgcacgccccaacatgatgcccagcgatgaaaccacgcgacagcgcggcctcgaacgacccaccgggctcatggagaagatcagccggatcatcgagaacgcgcccgaggagccgaaccagaccgagatcatcgaactgctgaaggacgacggttcaagcgcccggaagaccaccgtgctcaccgccatcaaccggctgctcgagggcggatggatcagcaaccgctccggacgaaacaaccggaacatctacgccagcgtcagaccataccggcagatggacgacccgaaatcggacgctttcgtggatcggatgagcagggaggaggcgagcgaattggataaggaaaaccatctcgaaatctagttgttcccgttgttcccagttgttccgagttgttcccggaacaactggagtagcgatgtccagctgttcccagcactccccacccacactacgtgtgtgggtgggtgcgggaacaactgcgactcggccctccggaacagcaaaaaaagcacgtcaacgacactagttgttcccaatcaagaaaacgtcagaaaggagaccgaaagatggcactcacattcagggagcagatcgaagcgaccgcatgggagcttggcaatggagagggaaccacgcccgagcttcgaaagcgcttcgatgcggattctgagaccccgaacttcgatccgaccaaggcgttggagatgctgcacatactccagctcatcaactacaagcaatccggcaagggacgcggacgcgcccgctgccactatctgaagaaacccgaatacggactactcaacctcaatgagccgaaaccagctcccaaggacgagcgggagcgggaaaaccgcatccaatgggccaaggacttccgcgtcatcgccgactggctcgacgcgaactgttacacgaccgaaagcgagaaagcatgaaagaatccgtcaccatccaataccgctgtgaggatgctgacaccaatctggtcgaaaccatcccaatcgcctccatcggcatcgaccagtggagtcaaggccatcccgtcctgttcaaccttgaccggagaggacatcacggccgccgtatgctcagcgtactcatcaccgcctgcgaagcggtgctgcatgaaatccaggacatcaaatgggaggactgacccatggccggaccgattgacgtgattcaacgggcgctcagcgcactggcctcagcgggattgggcagcgagtcgccggcagaggcgtatgtgctcggctaccaggccggctggcgggaagcgctcgacctgtgcatacgaatcgaaacggcaatcaacaacgaaacggaggaaacgaatgagcatcatcagcagtgaaatcgaggcacagaagcagcgtgacccgtcgtacatcgacagtgacctgcagtgggcgtggggacgaggatacaaggccggagcgtcacgcggaatcaccgaagaggagattgccgccgccatggccgaaacccgaaagttcatcacgctccccggcacgtggatggagaacatcatcagaatcgcgttcgacgcggcaagaagaaaggcaatggaggagtgagcaggccacgcgcccgtgaacgcaaaccagcatggcttcgcgcgttcatcccgaaaacgagtcccctcgttgtcaccgtctgcgaggggtgcggcctgtacgtcatcgaggatcgggaaaccgtgtgggagtcgtgggattacgggtgtgtggcgggtgacgacctgaccgtggcgataatcctcggccggccgttgacccgcgtcacgtggcttccctccgtcggccacccgctgctccgtagcacctgcggagatgcaggcatcagaccggacggccagtatctggccatgcacatgtgtcatctcgcccggataagcgtcaaaccgttcaaaccgccgaaacgggaacgcccgccaggcaagccatggggcgggccgaaactgtcgaagcaggagatagccgaattcaaacgcatatggaacatgccatacagccggctcaaatacgagaaagccccaaccatggtcggccagggcgatgagaagcaaacattattctagccgaccagccggaaggggccaacgtgaactgccagaactgcaaaacgataaccgaagggggatattcactgtgcgagacgtgcgaactgcgtttcgccggcacgctcctgcgactggcgcgcgacgtcacgccgttgcatgactcgttggacgcgaccctgcatccgggcgggcattcgcccacgcgaatccagaccgccactcccccgactccaatcaggctcgacgtgctcgacctgatcgacatgctcgacgccacggcccgtgaactatggcgttgcctcgacggcatcgacgccttggactggcgcaaagacaaacgcaacgaggatctgaaggccacgctcatcgcatgcgcaggccaccccaggctcgccacgttcgcggacgcgggcttctacatgcacgtcgttgacggcatcgcacgcaaagtcgatgctgcgctggacccgccggagcaacgccgcgaaatcggcacctgcgaactatgcgagaccatgctcaccgctggggcagcagaccagtgggtgacatgcccggtctgcgggagggaacagcgagcgcagacggttaaactgcgtaggctcaagacgttgtgttgggatgattccaggcgcgggtctgcggctgagatagccaaggtgttcacggacgcgggaatcaccgtcaaaaggcatacgctcaccgtgtggaaatcccgaggcaagcttgatgtcacgccccaaggcatttcatacagcagcgtctaccggctcgtcatcagtggcggacttgacaaagagctgactgtgaccgcataatgtcagtggattagtgtcgaaaaacccagctcatgtggctgggttttcgcgtatctatgctttgtttttgcgtggccttcctccgccgacaccacgtcccggacgttgagcgttccattcatcgatggtctcaggcaaccagccgcgcgtgcggcctatggtcgcgtcgggttcggggagtttgaggttgagcaggccgccgctggtgatgccgaggcgttcggcgacctgtttgacgccgaggtattcagtcgtcattgttgccttccttgccgttgatgattccggccgcaaggcccatgattccggccgcgagaccgaagccgccagatactatcgggctgtcggatagcgcgccgcccaaggccatggctccgaacgtcagggccacgattccgaaaatcagtgatgttctcatgatgtgtttccgatgagataggattggcggggaggttccggctagtagggttagccggaacctgttttacttcttgtgcttcggtcttcgtctgattgcgatgattatggctatcgcggcgaggacgttggcgatgatgccgttgatgacatcgaaccaatcctttggattcatcggacctcctttctgctgacatatctatagtaacacaataactatagatatgcaagccggggacaccaagacacgccaacgaacacaatgactgcgaggcacacatgagctggcgagtctgctcgacacccggatgcccgaacctcatcgagacgccggcacgcaaatgcgacgcctgcgctcgggcccagcgggaccgcgcccgtacccgaggccataacccctacggtaccaaggggcaccaatcattccgcaggcaagtgctcgcacgagacccatactgcacatgccccggcgactccggacgcggaggctgcggcaaacaccacggactctgcggcaatccaagcacaatcgcagaccattacccatacgaaagaaccgaactcatcgacatgcgactcaaccccaacgacccgaagttcggacgaggcctatgcaaacaatgccacgatgtaaaaaccggcaaaacaagaccagcaggcttcaacaccagacaataaacaggaacactgtgcatcacgacaaaaacagccggcaacacccccaggggggtggggtgacgaccaccccgcttggaccgccggtgagctgtctgtcgggtgcgcagggttcaaacatcgctggcgggccgccgcgagggcggtctcgtcgatctgtcgctagggcgcaaggccatgacgagaggtgaacatcatgccaagtggaggcaaacgagtacgctccgggccggccaaggacccgaacagcgagaagagccgcagactcggatacacattgcagagcctgccgaacaccgagtgccggatgaagccgccggaatggcccttggagcccgccgatgacgagcgcgtccgcaaacttgaggcggagaagtggaagtggctgtggaagctgcctcaggcacgcgcctggcatctgccccagttcaagtggatgatccgggaactggcgttgtacgcgcggctttccaccgcatgcgagatcgcgccggcacccacggcgttgaccgtgctgctgcgcatctccgaccgcgtcggcatgagcgccgccggattgcaggcattaggctggaagatcgaggccgaggccgagcggaagccagtcgattcggagttcacgcgccgcagggccaaggagctgaaccgggaatcagccgccgaacgctctcccatggacgagacgaagcatgtgtaccagcgtcggatgagcggcaatggctgacgaggattcatggctcatcgacttccccacgttggggcatctggtgtgcgcgtggatcgaacgtcactgccggcagcctgacggcccgttgcgaggccgtccggtggtgctgtccgactggcagtactggctggcggcgaaccgttggcgcatccgcgtggacgccccatatgtgccgcccgaggaagtcaccgtcgacaacccgatggtgctcaatcaggcgttcacctatcgaatgacgttgaccgtcggaccgcagaaatggggcaaggggccatgcacggcgttcttcaccgccgccgagggctgcgggcccaccatcttcgatggctgggcacaggaaggcgacgtgtaccggtgcgccgacaacggctgcccgtgcggctgggagtggccatacaatccgggcgagccgaaaggccgtcggcatccgtcgccgctcatccagttgacggcgaactccgaggagcaggtgcgcaacatctaccggcctctcgtggcgacgatcctgctgggcccgctcaaggagctcatgcgcgtgagggacaccttcatccgcatattgcagccggggcgcgagggcgaggccgacgccttggacttggatcgcatcgacgtggtcacctcctcggcgaaatcccgtctgggcaatccgatcacggacgccgaacaggacgaggccggcctgtacacgaaatcgaacggcatgatagcggtcgccaccacgcaacgccgaggagccgccggcatgggcggccgcacgcatgcgtggacgaacgcatgggatccgggcgaggacagttacgcgcagcaggtgttcgagaacgccgaggacgacgtgttcgtgttctaccggaaccccgatctcgcgaaatcattgcgtcaccgcgacggtcggccgttggacttcaatctgaaatccgaacggctgaagatgctcgaatacgtgtatcgcggctccccgtgggtcgacctgaattccaccgaatcggaagccaaggcgctgatgaagaccgaccctacccaagcggaacggttcttcgggaaccgtctggtgcagggcggcggcgcatggctcgaagacggactatgggagagctgctatgccggcgcatgaactctggctgccgaacccgccaaaaggcacacgcgtatgcgcgggcttcgacggttcggagaacgacgactggacatgcatcaagatggagaccctcgacgggctgatattcacaccccgatacgggcccgaccagcgtgcgaccatctggaacccgaaacaatggggcggccgcatcccccgcgccgaggtatccgcagcatgggcggaactcaacgaacgctacaaaatcgaacgcgcctactgcgaccccggcttccgcgacgaactgtcatgggaatcggagatagaagcatgggatcgcgcctacgggccgaagaaattcctaccgtggagcatgtcgggcagctcccgcatcggagccgtctacgaggcattgcgccgattcgaagccgacctgaccacacatcgcatcacgcaggacggctgccccatcacccgcacccacatgatgaacgcgcgaaaggtcgccaagaccctggaacgctacgggctggcgaaaccccaacagaacaggaaaatagacgccgccgtgaccagcgtgctcgcccacgaagccgcatgcgacgcacgggccgccggctggggcgctcgcaaacacaattacatgcttaccggatcatcgaccagaaggaggtactgatggactacagccagcaggaactgtcctcattggcgaaccgactggccgataagatccagttccgtcgacccagcatcggcacccacaccgattacgtcttgggcaaacgcggcaagctcaagttcgcgtccaaggaattcaagcgctacatgagcgaccggttctccgacttctcggacaactggtgcctccccgtggcgcaggccccagtggaacgcatcaagttcaagggcttcgtcccttatgatgacgtgaagctcggcaccggcatcatgaaatgcctcgaccgcaacgacttcgaacgcggacttcaggaagccgcgctgatgatgaccaccacgggccgcgcgttcgctttggtcacgcaggtcgacggcagggcccgcatcacgttcgagcacccggacagcgccgcagtcatctacgatgcgcgcaccggccagccgtcagccgggttcctcatccagcagggcgacgacaaggagtacggcaccctcatgctgcccggctggacggtcagcatggaacgcaagaagatgctcgatctgaccgaccagcgcgtgccgcccgacgtgtacggctggaagatgaatgaccctcagcccaccggtctggacacgattcccctgcgcgagttccgcaaccagatgctattggacaatgcgccgatcagcgacatcgcgcacgtcgaatcgatgcaggacacggtcaacgtcgtatgggcctacctgctcaacgctctcgattatgcgtcgctgcccgctcgtgtgatcctcggcggagacccgctcgtcgagcccgtctacaacgaggagggacagcaggtcggcgagaagcccatcgaactcgacaagcaggtgctggagcgcatctaccagttcaccggcgacaacgtggacctgggcgaatggtcaagctcgaacctgaacgtgttcatcccggtcatcgaaaaagcggtggagcatatcgccgccgaaacacgcacccccggccattacctgctgacgaacgcggaggttccggccaccggctacgaggtcgccgaagccggcctcgtatccaagaccatcgaacgcatcagcttcctgaaatcccccatccgcgacatctgcagcatcgccatgcgctacgagaacgacgtggctgaggcggacatcatcgccgactccaaggtgcagttcgcgaccccgcagtatcgcagcgaaaccctgatggcggacgcgatgctcaaatacaagcagctcggcttcccgatccaatgggtcgcggagcagatgggccaaagctcggacgaggtgcagcgcatcatgcgcatgcgcgccgacgagatggccgaccccgaactcgaatcgttgaaccgtgccctgcagatcggaggcgctgatggcggtcgaatctcaggtgctggcctacagtcagaaacggctggcgaccttggagctggcggcggacagagccgcacgcagaacatggaacagggtcgacgccaataacatccaggcgtcgtggaagtcgataagccgcgacttcctcaccctgttctccaccatccaaaccaagtcggcggagacagccatcgacgcgagcggcatgatgctcgccgaacagggcgtgtacgtcactccccatgctttggctaacccgaacgcattcgcaggctgggctccgtccggcctcgacatcgcctcctacttccaatcccccgtgttcgccgccctgcacgcgatacgcaccggcagctccccgttggaggcattggaatacggacgcaacctgctggtcatgcttacctctctggcggtcatggacaccgcccgccaggcggaatcactggacatcaccagccgtcccaaggtcggctacgtgcgtgtcgagtccgccagctgctgcgaccgatgcatgctgctggccggcaagtggttccgcttcaacgaggggttcctgcgccacccgcactgccacggccgccacgtgccctgcagccagggcatggccaaacagcagggatggatcagcgaccctatggagggtttcaaaagcctctcccgtgaggagcaggacaagcgcttcggtgcgaattacgcgcaggccatccgcgacggggccgacatctaccaggtcgtcaactcgaaacgcggcatgcaaagggtgggcaaaggctatacggcgttgaccaccagcgagggcaccacacgatacgggtgggccagcatgcaatacgcccagcagtccggacggaggatgaaacgccgcctgtccatcgacggcatctactcgctgaccggaggcgaccgggagaagaccatagccgcgttgaaggccaacggatatttcgtggacaacgactggcgcggcaaggtgcccgagatccgcaaaagcatgtggctgcacgacaacacgtaccggcaggggcgcgtcgaactgttgaccgccgccgagaagcgcgttcagaccgcgaagctccgctacgaggccgtattggagggccgcaaccccaacgatggccgcatgcccctcacccccgaaatcgccgcccaatgcgaacgcgaataccgccgatgggtcacctccggcggacagattttccagcaatgatccagcgaatcgaaaggaagaacatggatcccgcaaaccagaaccagcagacaggcgacaacgagtccaagaagccggagaacaccggcggcgaggattggcagtcgaagttcgaaggacagcggaaagtcaaccgcgacctcgaaaagaaactgaacgaagcctacgccaaggccgacaaggtcgacgaactcgaaaaacagatcgccgccctgcagggcaaggaagccgaatacgaggccgccaggaaggaacaggccgtcaaggacgaggcccttgccgccgccaaccagcgcatcctcaaggccgaagtccgcgccgcagccagcggcaagctcaccgacccggccgacgccctgcgctacctcgacctgtccaaattcaccgtcacggatgacggcggcgtggacacgcagggcatcgccgactccatcggcgaactgctggaacagaaaccttatctcgggaaagccgagcaagcaccctcgggtgcgaacatcacgccgcccagcggaacacgggacggcgaccgccatcagggtcagctcacccgagacgacctgaaaaccatgagccccgcagaaatcgtcaaagcccaacaggacgggcgactgaaggacctgctcggagccaactaacggaaggaggccttaaatggccatcaccaatttcattcccgaactctggagcgccaacatcctgctggaactccagaagaacctcgtctacggttccgccgtgaaccgcgactacgagggcgacatcgccaactacggcgacaccgtgcacatcaccggcatcgcgcacatcagcatcggcgactacacggcccacaccgacatcaccatcgaaccggccaccgacaaggacgccggcgaactcgtcatcaaccagagcaagtacttcgcgttcgaaatcgacgacgtggagaagcgccaggccatgaacaacctgaccgccgcatattcccgggacgccgcctacaagctgcgcgacctgaccgaccagtacctggccggcctgatggcagcaggcgcgaagagcaagctcgacccgatttccggcgccaccgccaccaaggcgtacgacaccatcgtggatctggccaccgcattggataagcagaacgtgccagacgcgggccgttgggtcatcgtcaacccggacttctacggtctgctgcgcaaggacagccgtttcgtcgctggcgccgagtccgctcattccacgctgctcaacggcgtggtcggcgaggccgcgggcatgaccatcctcaagtccaacaacgctcccgcagccaagggcggctccacccagtctccgaccgatgagggcaacgtcatcatcgccggcaccaacgcggccaccacgttcgcggagcagatcgccaaggtcgaggccacccgcaaggagaagggcttcgacgacatcgtcaagggcctgcacctgtacggcgcgaaggtcgtgcgccccgaagcgctggccaccgtacacttcaaggtgggcaagtgatggccggcagctacgaggccatgccctacttgggcgaagccgaataaccgcataaggggggggctcatggacacgctggcaacgatcaaggaccttgattcatacggcatcgaatacgcggacgaaaagctcgcggacaagctgctcgaatcggtttccgcagcggtgcgcgacgccgcaggctgccccatcacacgcggcgaatacacggtgaccatccccggcgaaacctcgcgcaggctcgacctgcccatgcgccccgtgatttccgtgagccgcgtgctcgtggacggcgaggagaccggtgattggaaactgctcggcaacgccctgtacagggaaagcctgtggagcctgccgaacatggtcccccgctccatcaccgtcaccatgctcgccggctatgacccgatccccccggacatcgtgcgcctcgtgtgcagcatggtcgcagccggactcgtccagcagtcgaacggcggccccggcgctcaccgcgacgaatcgtacgcacgaatcgacgacgtgcagatcggctaccgtcagggcgactccgagatcatcgacgcactcgaactgcccgagggcacgaaacgagccctccgcaacaggttcggcatgcgaggcatcgccataggggtgttccgatgaacgtgcagcacatcctcaaccgaggccgacagctcgccgaatcattgatgaccgaccagtgccgcgtcacccacatgggcaaaccggtcaccgaccccgaaacgggactggtggaaccggctgcgaacaccgtgtatgagggcaagtgcaaggtgcagacctcgggtggtctggctgccgagaacacggagggcggcatcgtcgaagcgttgggtgccgtcactcccgtgtggagcatgtacgtgcatttcccctacggcaccatgggtttattgccgggtgacgtgtgcgagataaccgaggccgatgacccgaatctcaagggcaggaaactccggttgttgaacatgcagtccgagaagacacactccaccgcatgccggtggaatgtgaaggaggtgggcaacagcaatgagtgacatcaccatagacgcttcggagctgaccgcgttcggccgtcgtgtcgccgccgcgcacgccatggcttcggtcaaggtcgcgcaggcggtgaagaagggcgcgcaaaacgtcaaggaaggcgtcatctccgacctgcagacatcatcgaactacgcgatcagccgtatcggcatcggctacgaaatgggcagcaccggcaccaccatttatgcggatgtgagcccccgcgacggcggagcttccgacttggccaacatcgcgttcttcggcaccgcgaaaggcggcggaacccactggttttaccagttcgccgaacaggaattgcccacgctcgccgaatacgtgggagacgcggccgacgacatgctgataggagccatcggattatgagcgtcatggacttgaccaatgcggttctcgatctgctgccctccatgccgtccggcgtgaaggtgtacaggcaggaggagccgctggagtcggagatgccgccgtggatcatcgcgcgcgtctccaccgaccgtcatgtgatggcggagacgatgcggttcaccgcccactccgccctgttggaggttcgcgccgtcagcaccaccgccgacagtgtgaacatctggtgtgacgacatgctgattcccgcgttggcgaaccgctcccccacccggccgccgggctacacggtcggccagctcaccctgtacgaggattccggcgcatatgcggccggtctgacagccgacgacaccgcgcgccgctaccaggtgcgcgtcctgaggttccgcttcacgtggagccgaccatagtcaaccaatcatttaccaaaagtcttcaaggagcacattatgaccctgaaactgggtacagagattcccggcaccagtgccgagggcaacatcaccaccatctgggtgccggcgatcaagaacatcaaggccccgaccatcatcgagctcgaggccggcaccgacatctcgaactacgtcatgcttggcggctggagcttcgacccgtcgcaggacaccgtgtccgaccagcgcgagaacgccgtgcaggacttcggggcccccggccgcaagagcgccggcgacatcagcatcgaggtcatcgacaacacgaacacggagcacgaggaacagaacgaggccgtcaccctcatgcacgagggcgcgtccggctatatcgtgcgtcgccgcggcatggccaccgacgcgccattggcctccggccagaagctcaccgtcgtgagcgtgaagtgcggcgaaaagaaggtcatcaacccggatgcgaacaccatgatccgcagtcagatcccgctgttcgctcaggctcccggctgggagtccgagaccgccgtgctggccgcagcctgacaagttcttccgtgcggggattctaagcctttctggccccgcacaggcattctctcttctctctctcagaaaggttttcagactttcagaaagggataatcatggctttggaagtgaagcgcaagcgcgtggacgtcgacctcatattggatcaggagaaggccgaacaggtcgccgcattgggagcagacctggaacgcgccatggcgcagcatgtgaccgagggcggcaacgccgccgccaaacgcatcgccgaacaaatcgacaggctgcgcgacgaggtgaaggacgacaccgtccgcatcaccctggaggcgctgccgctctcccagtggcgtcaggtactcgaggcgaacaccgtcaccgagaacggcgtaccgaaacaacacatcgaggacatctgcgccgacgccgtcagactcatggtcaggaagaccgtgccggaaacccccgtggaagagctggccaacgtcatgaccgaactgtccgacggccagatcagccccatctggtacgcgatccgtgacctgaatgcgaagctcatcgacccaaaagacgcactcgaatcagcctcgcggataatccgcagacagtaagggaactgcgaatctgccagaagctcggcatcagctacaagcgttggctcggctgggaaccgtcgtatcgggtggaaagggacgggcataggcgcatcaccggctacacgccggaaaccgaatgggatgcgaccgaacgcgaatggatgctcgcactcgacgaatacgagcgcacgctgtgtccgcgctgcgggatgcccgtcagcatatgccacgacgagctggcccccaccaaatacgcgagcgaggtcggcgtctgtcagatcgacctgatgcgccgcatcgggctcgaagaataccgcaaggaccattccgcggaatccgccacgaaacttgactcactgaccgtgggcatcaacccacgatgatccgacaggaggatatgccatggccggtggtctgaaccgcaacatcactgtccgcctgctcgcggacaccagcaatttcaccgccggcatggccaaggtgtccggcgaaagccagaagaccgcgaccaccatggaagccgccggaggcaaatcgaagctcatcaccaccggcatcgcggcggccggtgtcgccgccaccgcgctgggcgtggccgctgtcaggatggcggcggacttcgacgccagcatgtcgacggtgcaggccaacaccggagccagcgccgatgagatggcccaactgcgtcaggccgccatcgatgctggtgccgataccatatactcggccaccgaatccgccgacgccatcaacgaactcggcaaagccggcctatcgacctcggatattctctccggcggtttgagcggcgcattgaacctcgcagcgtccgacggcatggccgtcggcgacgccgccgaactcatggccaccaccctcaaacagttcaacctgacgggcgccgaatccactcaggtggccgacgcgctggcggccggcgcaggcaaggccgtcggttccgcccatgacctcggcctcgcattgaatcaggcgggtctggtggccaacagcatgggcgtcagcatgcaggagaccaccggcacgctcgccgcgttcgccaacgccggcatgataggcagtgacgcgggcaccagcctcaagaccatgctccaacgactggccagccccaccgacaaggcgcagaccctcatggacgagctcggcatcaacgtgtacgacgccaatggcaagttcatcggccttgccggtgccgcaggccaattgcagaacggtttgagcggcctgagtcaacaggaacgcaatgccgcgctcaacaccatcttcggagccgacgcggtgcgagccgcgaacgtgctctacgagcagggcgcggaaggcatcgacgactggacgaaagccgtcagccaatccggctacgccgcggacctcgccgccaagaagaacgacaacctgaaaggcgatctggagaatctgagcggctctttcgaatccctcatgatctctttgggcgagggaggtcagggaccattgcgctccctcgtgcagacactcgacacccttgttgacggtttcgcgtcattgcctgcgcccgtacagcagtccatagtgctgatggcggctctggttggaggcagtgtcgcagtccacaaagcgatggggccgctgaactctagcagcagccagcttgcgcaaaccctcggattgattgccgacccagggcaaaggctcataggcctcggctccggaatcgcgtcagcgttccagacatggggcgcaactttcggcagtgcagaatctcagataaacacgtttggcaccactatcagtcgttcccaaggcattatggccggtttcaaaaacctgggaagcggcatagtatcgttgctgggcggaccatggggcatggccatcaccgccgcaggactcgcgttgttcgctttcgcgcaggatcagcaggccgccacgcaacgagtggacgaactcacccaggcgttgcagagcggacaaagcgccgccgaatacttcaacaaggcgctctccgaaagcgattcgtcacgctacacggccgacatattcagccgttggacctccggctacgacaatgtgcgagaagcactcgacaagatcggcatcgcccacagcacctacatcaaggccatacaaggcgagcccgaagcgattctgcgagtccgcgaacagaccgacagctaccgtgactcgctcggcggcatcaaccagatgtgggaccgcacctccaacgttgcctacggcgtactgagcgaacagcaggagatcttcgagaaatcagccgcagcggccaaggaggacgcggccaactcgaaggccgccgcacaggagaaactggcgcagacgctggccacgtccggattggtcgacgcgcagtcggcgaacgcggacgccacgcaggaatcagctgacgcccaatctatccttcaggatggtttgggagcgaccaccgacggcatcaacgagcaggccaccgccttgggcgaggtcattgacgcgctcggaacctactacggtttcgcgctctccagctccaacgcgctcatctccatgcatgactcgttcgacaaggcgaccgaaagcgtgcagaagaacgggcagacgctcgacctgaacaccgaacagggacgagccaaccagagcgcgttgaacgatctcgccgaatccgcgttgaaggcggcggaagcccagtcacgcaacggcgaaggactcgaagcggtcaacggcacccttgacctggcacgcgagaaatacatcgcagctgcacatgcgatgggcatgaccccggaagccgcagaagccgcagccaacgccgccggcctgaccaaggacaagttcgaccagctcgccaccagcgtcaacagcatccccggatccaaagccatcgacgtgaacgcccacaccgaaccggccaagaacagcctgaccgacctcggcatgacggtggcgaaacttcctaacggcgaaatcaaaatcgacggcgacaacacacaggcactcgccgccatcgaggcggtcaacggcgtcgaagtggatccgcacaccggtgtcatcaccatggacaaaagccagtacgacaccgccctcgcattggcgaacggagcgacgatcgatccgaagaccggtcatctgatgggtgacaacagcgactattggaagaagatagccgaagcgaacggctggaccatcgacccgcataccggcatgatctacgcggatgacggtcaggccatgagcgtcatcaccaatctgaacaacacgcagatcgcggacaagtacttcaccatccatggcagctacgtcgatgattcaggcggcacgtattcgtccagtggttatcgtccggccggtgcgatgggcaatatccccaccggtaagaccggcggcctgttcaccggttatggggtttcgatgcgcggctacaccactggcggcagtgtcatcgagggcctcctgccaggcaaggcgagcatcacgggcggcgacaacatcacgttggcgaacgcgcgagtcaagagcggcgaattcgtgtccaatgtgaaatccgtcgcatattatggcgccgacacatacgcggccatgaaccgccggcagatacccaaggaatcgttctccggccgggatatcgacgtgagcggcgtcatcgaggagatacgttccttccgcgagcagatcggcccaatcatcagcgcgtatgccccgcaactcggcaaacgcgacttacagcggctcaccaaggaggttttgcgcacatgatgcacacgctcacctacacgtcaaaccgcgccggaaccgtgattgatctcgccgacccggagggaatcatgtgcggacagatcctggagctacgcacccgcacgtgggagttcgagctcggctaccggtcattgcatgccacgcggcccgcgaagaccgtcaaggtcaccgggctcgtctacggtatcccggcgctcgaaaaggccgaggaactgttcgacgcggacatgtacgcctacctcaacgatgccgcgaaacccggcgtcatcacggtggacggatggtcacagacctgcctcgtggtcggccacgaacctgactacacgtcacccctgctcgtgcgcggcgatttcacggtcgccttgcttgacggggtgtggcacaaaccggtcaggcagagcttcagccggtcgacggcccgctacaacagaggcaaggactatccctacgactatcgctacgattacgcgccgacccgcaacgtcagcagcatcgacaaccaatccgccctgccctcgcggatgaggctcaccatttacgggccggtctctacgccgagcatcatcatcggcggcaacaaggtgatagccgacgtgagcgtcccatccggcggctacctcatcatcgacggcaccggctcaccacgcacggccgtgatggtcgccgccaacggcgacatcaccaacgtgttcgacaaaacgcatcgcgaccaggcctccaacgaatacgcgttcgccaccctcccgccgggactgcagcaggtctcatgggatgaatcgttcgggttcgacgtggagtactggttggagcagacgggactgccatggacctgatctggaccaataccgctcacgtgccacaaggcgaactcgtctcccccgcactcgacctgcagtacggcgacgagcagaatgatttcgaactcactcactccacccccggactgctgctctccgacggctgctacatcggggcggaaggcaccgagttcggaggccgcgtcgacgcggtgcgtatcactgtggatgacgggcatgccctgtatacgctcaccggccgcacatggcacggtttgcttgcgggcaagatcctccaacccgactccggcaccgaccggctcacggtctccggcgacgccaacagcatcatccgtacggtaatcagccggatcggactgtccacggtgttcgacgtgccctcggaaacgagcggcatcaccctcagcaactattcgttccgccggtacattaccgcgtgggacgggttgcgcatgatgctcaccgcgcagggagccagactcgacctgacctacaccgctggacgctgccggattcgcgcggtcgccgccgacacgtacggcgacgcggacagcgaccagcgcatcagtttcgaggcgcaacgcatctggacccaagtcaaccacctcacgggcctgggcaaaggccagctgcgcaacagggcgcgcagcgactggtatgcggatgcgtccggcaacatctcccagacccagactctgaccggcgaccgtgagatagctcagatctacgagctcatatcctccgaaggcgccgaattgtccgaccagaccagggacaagctcaaggacatgtggaaacagggcaccgtcgatttgacgatccccgagaaccttggcctgcatatcgacgaccatgtgcgcgcctacgatgcgctgaccggcgtcagcgtggacagccccatcgtgcgcatcaccgtcaaactcgccaacggcacaccaaccatccgatacgaagccggccaatacagttggcccgatgaacaagactaaaggagcatcatgccgaaacagcccaacatcaccctctactcctgtgatcggccttcgtgcgtcaacaaggaatacgtgttgcccaacgcgacggccagccccaactggcacgaggtcacgcgcgtcgaccgcaacggcaaccagaggaaaatccttttttgcgaatccgactaccagcagtacctacagttggccgaaaatcaggacaaggattatgacctctggctcaacaagtccctcaacgcggaaggtaagtgatcatggcaacaaatctgcttgtaaccggctcgcacggcggcgacgacccgcacgtggaatcgaagcatgacgcgctcatgcacgccgccatgctcggtcgaggcggatacattttgaaaacccggaattggacgatgaaaccgacggcgaaggatgcgaacaacatcaccatcccagcatgggacctcgtggtcgagggccggcagatctacatcgccgcaccgaccgacgtgaacatccaatccggctcgcaagggcaaaaacgacgcgatctcatcgtggcccggtacgcgttgaactcaggcaccggcgtggagacggtcaccctcgaagccatcaagggcaagcccagcgcggccacgcccgcggatccgggcatcgagactggcagcatcatcggcggggccatcgtctccgacctgccactctgccgcgtcaacctcgacggcatcaccatcacatcgattgacacgctggtcaatgttatgcagcccttggaggatgtgtgggattccctaacccagcgttccacgacatggcgagtaccctacagcagcaacagcattacactgacccgcgtgggcgatatctgcttcgccggcggcaacgtgaagttcgcccagagcggcgagaacaactacacgcaggcgcgggagaccatacccgaggggtatcgtccagcggaaaaatcgaacactccgatagccgtgttcggcggcaacaccacactcatcctctacggcgagcatacgggccgggtgaccatgctcggcaacccgaacagcgcgtacgccggatgcaccggcgtatggaggaccgccgacccgatgcccgccgcatagcttcgggacactggctcaggcggttgcactgtcttgcagtgaccccacgggtcatagcgcgtatgagacggtcatgccgaacgcgttcgtgccctgcgtgccgccctgattggcgtaggtcatggttccgttcgcgtttacgttgatgatcttctggttggccccgtcgcgtccgccgtaggagaagttcaagttcatcgggggacgccatccttcgggcagagtgccgaacgtgccgttgttccacgagccggaggccgacaacttccagtcgattcgcaacgtcaccatcggcccggacctatagccattgacggtgccgtaattgccactgatgagggtcgtgacatcggtgcgggttagggaaaactattgcctgttccagattgcgatccagcttccgaatatcgcgaccctcccgcaccagcggttgtttttggtgttccacaggcggaagcgtatctggtttacgtcgctggtatcccaacgttgtgcggtgtactcgccggcctggccgaaaccagtgccgaacggcccaatcgcgtaggccgcgtaatcggctttcttcccgtttggggattggacgttgatgtagaatgtgccgtcatcattcgtggtgacggtatggcctccgcacagaatatacggcattcgggttagggaaagctacgcggtaatccaacagccggatataccgacgaatcggccggcatatccggtgccgttcaacaccattttcccctccggcgtgccgtaaaggtagaaactggtcgcgccgccgttgtcggtgccgcgcatgaccgcgcgggaatcgccggacggtctgaaacccttcgggattgtctcgctgacggatgtgttgccggtctgattgaaattgcttgtcagcgtgatatacgcgcaggcggtgacaatacggccgacacgaaccagagtgatatacctgtcggaatacggcatcctgacttggcccgtgacaggggttagggaaacccgctcaggctattagggctcgttcccagaggcgttgcgcgtctcgcaaagccgtgatatccggtttgaggtagtacttcgcggtggttttgatatcgctgtggccgagcattttcgacacgatggcgatatccgctcccgccgccagagtgttcgtcgcccatgagtggcgcaggttgcgtacgggcacgtgcggcagatcatgccgcttgcagtaggccttgtattggcgtgcggcttgcggcggggtgagggtgccgatgagtcggcccccctcgcgtggcttgatttcgcgcagtcgtttgacggcgaagcgtggcaacgggagtgtgcggcgggacagttcggttttcggcggcacgacggcctcatgcccgcccacccattgcaggccacgctccacgtgcaggacacctgagcgcaggtcgatgtcgccccactccagcccatacccttcctcggtgcggagcccgcatgagacggcgcagatcagccacgcctcaagcggatgcccgtaaaagccctgcaacagtgcacgctgctgacggagggtcaatatggtcggctcgtaatgagttttggcggggagttggatgtcgcgtctggtgatgtccacgtccaagagattccagcggatagcccgcctcagtatcgcgcgtagtacgctccacgccttgcgtgccgcgcccgcgctgtcgaaacctgcgagccatttgtcgaccagttccacgctgatcgcgcccatatccatgccgccgaagcatggcatgacatgcagccgccacgccgactcgtaaccaacgcgcgtggactctcgcagattcgccatgcagtacggccaaaaccggtcgttccaaaactctcgtaacagcattttcaacctccaaaaacccacacgcccgttggcctatccaacggtgacgaacgtgtgggttttacccaccgtaaaggagcttttccatgtctttgctcactcacgtcgtcgattggctcgtgccttttatctgtggcggcgtggccacggttttgggcctgatgtggcggtggggcaaagccatggtcaacggcctgcgcgagctcctgctctgccagttggaggacctgcgccgggaaatggtcatcgagcacgacggagtggcggacgaagacctcaaatcacgcagtcaacgcctctacgacagctaccacagcctgggtggcaacgggcacggaaccgctctcaacgaggacatccaatccgcgccgatagcgccacgacagtcctgacccacgaccgtgggccacaaacaatatccatcccagagaaaagggaaacatggtcaacaatttgaaacgtcatccgaaaccatcattgccggacgagcttcgcccggacgtagccccgaaacaatcgaatccaataaggaggaacagtaatgacccaaatccatatttccattaggaagccgaagaccggaggcttggacccggtcaccggcacgatgcgattctgtccggtacgtcgccatttcgacgcggcgaagaatcttattatcgcggcctcgttcgacgcgaatctgtccgaaacgggtgagctgacggttgacctgctgcctacgactcctgcgtttgtttggcaggtcgtggagttggctgattcgccgcaggcgtacacgcgctacgtcgaggtgccggactccaagaccaaggtcgaatacgccgacctcgtggaggttgacgcgggcacgttcgtcccgaaggacatgcagggctcccaattgctgaaggttcgccacgcttccacccagtcggaggctgagacgctttccgcccgatacccggatgcggtggtgctcttcgacgagaccgccacgaccatgaaggccactatggccatgagcacgttggagtccatcacggccgaagcgcagacgaacgccgcgctggctaggagcgccatgctgagcgcacagtcctcggctgattccgcgaccgccacccagtccgaccttaatatcctcgcgtcgaacgccaacacgttggcggctagcgtcgccaatgattcgcagaccgtggccgacaccgccaacgcggttgcggcgaagggcgaatcggctatcgccaccatcgattcgacggtgcaggcggtcaaggacaaggcggaggctgcgaccaccgtactgccttccaccggcaccaccgaaggcaccaccgacaccggcaccaccgaggaaaccacggaggaacccggcaaggactccacgccagccaaggccaagaaggccaccgtgaagggagcctgaccatgccagccttttacgccggcaaacgtgtcggcaaaccattattgaacggccacacgtacaacgccctattcaacggcaaactcgtatggcccctcgacaaagacacggtcgtgagcatcgagatcacggacgacaagggcaagccgttgcccaagtcgctggccgtatccggcagtctgaaactgggtgccaaggccacgtatgcggacgggcatgtgggcgacctgctgaccaccaaggacgtgaccttcacaagccgggacacttccaccgccacggtctcgggcaacacgctcacgtggcggcatggcggaaccatattggtgacggccaccatcaacggtttcacgtccgcagccgcgtccatcgcctccgcctacgcgccggaaagcatcaaggtcacggacgattccggccagccggtcgatgcagtcaccctgcgcgtgggcgaaaccaagcatttcaacgtgcgcatcctgcctacggaagcatcgcaggaattcactgcgaacaccggaaaccaaactatcgcaaccatcactaaggaataattggcagattctagtggtggttgcaacacctgaggtttgagcggccttccatggtcacgttgtcggttgttgaggttatcacgcggcgtcgagcagttcgatgatcttctcgcttggtttcatgaacccgagggttttgcgtggccggtcgttgagttcctcggcgaccgcgtcgaggtagtcctccgggtagacggataggtcggtgcctttggggaagtactggcgcaggagcccgttggtgttctcgttggtgccgcgctgccacggggagtgcgggtcgcagaagtagacggccatgtccagcgaggcgccgatccgtttgtgcagggcgagttccgctccctggtcccaggtcaggctgttgcgcaggagtttgggcaggtgctgcatcttgtcgatgatggcctgctggacgtgttcggcgtcgtgcccgtcgggcaggtgcagcaggatcgtgaacctggtggtgcgctcgacgagcgtgccgatggcgcttttgttgcggctgccggtgatgagatcgccctcccaatggcccgggaccgcccggtcctcgatctccgggggtcgctccgagatcatggccatgggttcgcggaaacggggtttgcggccttggccgccttggggtctgcgggcggttcgcccctgcctcatggcgcgtttcagctcctgcttgagttcgcccctggcctgcaggtagatggcctggtagatcgtctcgacgctcgcgtgcatatccccattatccgggaagtccagcctcagccggttggctatctgctccgggctccaatgcctgcgcaacccggcggcgatctcgtcccacagtcgcgtgccctcggccgccttgcgcggtttggggcgtttgagccggtccgcggccttctgctgggcgcggtaaggctcgtaaccgccggactcgggattcctgttgcgctcgacctcgcggctgaccgtgccggggtcgcggcccagcaggcgggcgatggcgcggatcgaatcgcccagacgcagacggtccgcgatctggatgcgctcctcctggctcaggtatcgcggatggagggtcttgggtttgtccatggtggaacgataccagtccaccaggggtttctcgttccttcccgtggcgcgcgtcctgccgttgcgccacgccttgccggtgcgtttcgagacgccgaccgcgtgcgcggcctgggtgaagttcatgccttcctcgtccagcaggcgcacgtactcggcgcgtctcgcctcgcacatcagcttcctcgtcggatattcgacgccgttgaacgtccaacggtgttccccgccacggtcttcgtttcggtggcttctggtcacctgaccctccttgcggtaggtcaggtgttgcaacgatcactagaacccgccattatgagcgaaacttttagggggggggtggccgtatccggcctgaccccgggtgacaccagcctaaccatccaagccggcactatctcgaaaaccattccagtgcacgtgttacccccgatcaagaacatgtggatgaagatacaaagcggtacgctggatggcgtgacgtttacggtcgccgccgacggtggcatccacgtgaaaggcaccagcacctcgtcagtcgggcgtgccgatcgtggcagtacggataatacgccgttgccagcgggacaatacacgctgtccaccgcgaacctccccgacggaatcatcctattcgtagtcgttgccacaggcggcaagaccgaatacaaggtgctggacaatcaagttcacaatttggctgtcacgttcacggtatcggaaaacagtacctatcagtgcaaggtcggagcgaacaacggtgtacccgttgacgcgacggtgtatccaatgctggaaaccggcagcgaagcacacgcgtacaagccatacgcataaaccggaagcctcatgaataggggcttccattatttcaaggaggcccctcatgggtattcccgtaaccggcgtgaaacccggtaacacgacggtcaccatcaactcgaaaaccagtccgaacatcagcaagcggattccagtcacggtgaaatcccgtaacctgctcgcctatggtcccgccgagggcaacggtttgaccgccaccgtcaacagtgacggctcactgcacatcaccggcaccgccacacggcagtgggcgggcttgtcgtggacgttcccatgccccgtacagggcaccgtgatattgagcaggcccaccagtctcgacggtctgaccgtctccgtcaaatgccttgacgccaaaggtggtcaactgggtgcccagattaacacgggtaatgccaggacagtcccagccggcaccgtcagcctgcgcttcgaaatcctgtgtgctgagaccacgcccaccgcgaaggacggcgacctccgaatccagctcgaatccggcgacaccgcgcacgattggatgaaacccgacaacaccagccttagggggggggcaataaactaacgaacctctggcccgaacaccaggcgcaaaccagctttggcatcacactcaccccactggggaacggcgaatacaagctcgcaggcacatgctcacaatcattcaacatcgagacgacgcgcgaacttgaggccggcacatacctcgccccgaaatgccaaatcgactcatacaacgtgtacacggagattcaggacagcacaggtaaaaacctgtggcgcggatatcagagcgacacggaaatcaccatccccaaagccggaacgtacaagttcatgatccgattcgcatcaggcaaaacgatagacgcgaccttcacgccccgcctgtacaagatcgactgattctagccccacaccataccgtgtggggcttttcattgacggccccgagtgggccccgataatcctgacccacgaccgtgggccacaaaacaatattcacctcagagaaaggggaaaaattggttaaaaacaaggacaagccgtggtggaagcgtctgctcgccaagatcacggccctagtcgccgccatctgcatgatgctgcttccggcgaccgcgcacgcggacatgcagggcgtggacatgagcaactggcagtgcggcgcggacgtgtacaacatgcaggccgatttcatcgtggtcggcaccacatggggcaccgggcaagtcaacaacaactgcttggtgtccggcgtcaacacggacgccaaccgcatgatcgcccaagcacaagcatccggcaagaaattcggtttgtatcactacgcgatgggcggcaacccggaggccgaagcccaattcttctaccggaacacgtcgaactattggcgtcacggcatcgtggcgttggattgggagatggacgacaaccccgcatggggcaagtgggattgggtacgccgattcatggccgaatgtgagcggctttccggtggtgtgcgcccattgctgtacaccggcccggtggccggcaccatcccgcaggacatccgcaaccggtacggcctatggattgcacaatacgcgaacatgagcccgaccggctatcaggcatccccgtggatgataggcgcatacggcgaggccatgcgccagtacagcggtaccggcgtggtcaacacgtggagtccgattgacctcaacattttccgtggcgaggcatggcagtgggatttgtacgccaaccccaccggctccacagccccggccccggcaacgcccgcgcccgtgcagccgagcactcccccggccaacaccaacacgggtggcatcagccacgtcatgcaatggggagaaaccatctggggactcgccgtagcccacaacgcttggccgttgtccgcatggcatacgcccagcggtgacatcaaccgctactacgtgggcgacgtcgtaacctacggcggcggcaccgcccccgcatcgtccggcggggtctccaaggtcctccaatggggcgacaccgtgtgggatttcgccaccgcgcacggttacagcgtcagccgctgcaccgtaccctccggcaacatcaacgtctactatgtgggcgacgtggtgacctgccgctgagactcaacagatgccgccacccgcttgaccgggtgacggcatcaccccatcatcatcccttattgatcggagcaaacatgaccgacagcaaaaacacgaccgacaccggcgaaacgcttcccggcgtcgatgtgagcgactggcccgagacggccgacgtcacccatgacgtgcccgactggctcatccccagccgcgtctacgacatcctcaaatggctcggcctcatcgtcctgcccgcactcgccctgttcgtcaacacggtcggccccgcatggggctggactcacgtggacgcgatagtgaccacgctcaacgcgctcggcatcctcgccggcgcgctcatcggcgtcagcgccatcaaacaacgcctcgaccgcgccgcataaccacacacagttcggccccgcccggcatcgcagacagctcgcacagagcttgactgctgccggacggggccgatttcgcgttgtggcagagggcttcgcgggctcgatttctgcccacattttgcccacattttccgtaaaaacaggttaaaaaccgttaaaactggttaaaacgaaaaaagccgctcagccctactcccgcaaggcaaagcggccatcttccaacccgttctcagctcagcgcgtccttcaacttgctgaagaaacctttcttttgaccggcctgtggacgggatgcctgggagacgtgcgtggcgcctgaatcgtgcgaggcggcgaactgttcgatgaggccacgctcggtttcgttgagcttggtggggataagcacattgacgtgggcgatgaggttgccgcgctcgtccttgttgcggatgttcgtgacgcccagtcccttaagcgtcaccgtgtcctcagtctggcagccggccgggatggacacggtcttctcaccatcgaacgtatcaatggacagatcgtggccaagcacggcccagctcatcggcacctgaatccagcagtgcaggtcgtcgccatcgcgggtgaactgcttatccgccttgatgcggatgtcgatgtacaggtcgccggcagcgccgccgccctcacccacttcgccctggttggccaaccgcagacgcgcgttgtcgttgatgccggcgggcacggtaacgcccacggtacgcgtggtgcgcacacggccgtggcccatgcagctggggcacgggttctggatgatggtaccgtggccctcgcaacgttcacagggggcggaggtcatcatctggccgagcatggtgcgcacgaccttctgcatgaatccctgtccgtggcagtcggggcaggtgaccggctgtgcgccgccctgggcaccggagccaccgcactcctggcacagggagaacgtattgatcttgacatgcgcggtgccgccgaacaccgccgtcttcaaatcgatggacgccgaggccaaggcatcgcggccgggctgggtacgcggcaccgggccctgtgagccaccgccgaacgcggaaccgaagaacgtggagaacacgtcgctcatatcgccgaagcccgccccggagaagccgccggcaccggcgttcgggttgttcgggtcgactcccgaatcatacatacggcgtttgtccggattggacagcacatcgtaggcgttgttcacttccttgaacttgtcctcgaactcagggcccgcgatgtcggggtggtacttacggctgagcttgcggtatgccttcttgatctcgtcgtcactggcgccgcgttccacacccagcgtctcgtaataatctgccacttgattgatcctttgtgttcgtttggtctgcgggtcattgtgccacagacggcggtcagtcttgagtccggccctcggagaggaaggcggtcaaatatctggctacggccctgacggcggccatagtggccgcgtagtccatgtgggtcggccctatggagccaacgaaggcgatgggttccgtgtcgttcgtctggctctccgtctcggattcggtttcgggttcgcctacgggatcgttccccgccggttcgcccgccgctccgctgcgcccatagccactgctgaccacggaagcatgcagtagtccgggggtgtgcatttcggagccgatggccacgcccacgccggatgcattcgtctcctcgctcaggttgctcatgagcttcatcagcacgacctgttcttccagcgcgtcgaagagcggggccagatcggccagggaccgggagtgggccaggtgcgaggtgccggacatgtacagttcgttcgcgcgttcgtccaatgccatcgattcgaaggcgtcggccagcgcgtcggccacgccacgcaccgactcgtagccggcgctggcggcgatggatcgcacggtctccgcggatttcgatagggacagcccgtcgcattgttcgttgacggtgttggagagccggttggtctcgtccacggcgggcatggatgcgatggtcaggccgtgctgggccacgcggccggtatcggtaatcaccacggcgagcaacgtggtcatggcaacgggcaccatctccacgtgccgcaatgtggccttggccagcgatggcgaggcgactacagccacttgaccggtgatttcggacaacagtcgtgccgaacgttgcagcgcgtccttgagactcaccgatccggacaggaagctgttgatgccgcggcgttgcgcctcgctgagcggcaccacggtagcaagtcggtccacaaagtatcgatagcccttttcggtgggcacgcgaccggccgaagtgtgcggctgaatcagatagccttcgtcctccagagcggccatgtcgttacggatggtggccgaactgacgccgagatcatggtcgcgcgtcagcgaagtggagcccacgggctcctgagaacggatgtaatcctccaccacggcgcgcagcaccagcatacgtcttgattgcgtcatgcgcgcctcctatatatacatacatattcatatcagtcacggttcactcagggcgtaccccgacggtcggttcgccacgccgcgacacgcgggaacccagaaatattgcctctttcttggctctgccacgtgcaggtggcgcacttcaccttagaacattgtattagcactccttaggcttgagtgctaatgcgttcgtttgcagcgtagcaatgttcactgtgaacgctaacagaacacaaactaccaaaacacgccaaaattgctccacaacgtcgcaaaccgacgctagcatggtaatcgcaatgtgagggcgtcaagcgcccggcacaagccggatacgcggcccgaccaattggaaggaaagtaatccatgaccgaattcaaggagaccgagctcgacgagcgcgccatcaagatggcgaaggtcctttcggctgacgcggttgagaaggcaggctccggccaccccggctcccccatctccctggcgcccgtcgcctacacgctgtaccagcacttcatcaagcacgatccgaatgatcccaactgggaaggccgcgatcgcttcatcctttccggtggccacgcctccctcacccagtacgtccagctgtacttctccggctacggcgtgaccctggacgaccttaagaacttccgtggcggcgctgccacccgcaccccgggccacccggagtacggcctgaccccgggcatcgaaatgaccaccggccctctgggccagggcttcgcctccgccatcggctttgcctacggcgagcgtttccagcgcggtctgcttgacccggagaccccgaaggaagattccccgttctaccacaagatctgggccatctgcggtgaaggcgacatcgaggagggcatctccggcgaggccgcttccctggccgccaaccagaagctcggcaacctgaccgtgatcttcgacgccaaccgcatccagatcgaaggcgacaccaacctggtgctggccgaggacgtgctcaagcgcttccaggcctacggctggtacaccgacgagttcagcttcatccagcccgacggctcctacaaggaggacatcgagggcttggctgacgtcatcgccaaggccgagaaggccgctccggaccagccgaagctcatcaaggttcactccctgatcgcttggccgaccccgggcaagaccaacgacccgtcctcccacggttccaagctgggtaccgaggctgttgccggcctcaaggaagccctcggctacgatccggaagagaacttccacgttgacgaagaggctctggctcacgctcgcaaggttgccgagcgcggtctcgaagcccacaaggaatgggacgagaagttcgacgcttggcgcaaggccaacccggacaaggctgccctgtacgaccgtctgaaggccggtgaactgccggaaggcttcgacaaggctcttgacgaccttgaggccaccttcgaagtcggcaagggtgtcgccactcgtggcgcctccggctccgtgctcaacgccatcgccgctgtcatgccggaactctggggcggctccgccgacctcggtggctccaacaagaccgatctcaagggcgctgccaccttcgccccggccgagtgcgccaccaagcagtggccgaactgcaacgagttcggtcgccagctgcacttcggcgtgcgcgagttcaccatgggctgcatcaccaacggcatcctgctgggctcccacacccgtccgttcggcggcaccttcttcatgttctccgactacgagcgttccgccgttcgtctggccgccctcatggagattccgaacctgtatatctggtcccacgactccgtcgccgtcggcgaggatggcccgacccaccagccggttgagcaccttgcttccttccgcgcgattcctcagcttgaggtcattcgcccggccgacgccttcgagaccgccgaggcttaccgttacttcttcgagaagaagaacaccctgcctggtgccatggttctgacccgtcagggtgtcccggttcttgccgagaccgccgccaaggccaaggacggtgtcaagaagggcgcttacgttctggtcgacaccgagggcactccggacgtcatcctcatggcttccggttccgaggtccagtgggctgtggctgccgccaagaccctggccggcgagggcgtcaaggctcgcgtcgtgtccgtgccgtccatggaatggttcgaggagcaggacgccgagtacaaggaggccgtgcttccggccgctgtcaaggctcgtgtctccgtcgaggccggcgttgccatgccgtggtacaagtacctcggctcctacggcaagcccgtctccatcgagcagttcggcctgcagggcgacggcgctcagaacatgatcgacctcggcatcaccgccgagcacgtggtggaggccgccaaggcctccatcgccgaagtcgaagccgccaagtgagtcccctagcctccctctgacgagggaggcttgtactcaagactccacctgatcggccctctcgttagagggggtctacttaaagatttgttccaatacggaatataaggagaaaaataaatgactgaagcaactcagcgtacgtctgacaacggcgtttccatctggctggacgacctgtcccgctcccgcatcgagtccggttccctgcaggacctcatcgccaacaagaacgtcgtcggcgttaccaccaacccgtccatcttccagaaggccctgagccaggtcggcccgtacgacgctcagctcaaggagctcggcaaggttgacgttgagaccgctgtccgcgagctcaccaccaccgacgtgcgcaacgccaccgacatcttccgcgagatcgctgaggctaccgacttcgtcgacggccgcgtctccatcgaggtcgacccgcgtctggcccacgacaccgagaacaccgccaagcaggctgtggaactctgggagaaggtcaaccgcccgaacgccatgatcaagattccggcaaccctcgaaggcctgccggccatcaccgccaccctggccaagggtatctccgtgaacgtcaccctgatcttctcgctcgagcgctacgagcaggtcatcgacgcttacatcgagggcatcgctcaggctgccgccaacggccacgacctgaaacacatcggctccgtcgcttccttcttcgtgtcccgcgtggacaccgctgtcgacaagctgctggaagccaacggctccgacgaggccaaggctctggagggcaaggccgctgtggccaacgctcgcctggcttacgaactcttcgagaagaagttcgccgaggatccgcgttgggccgacctggctgccaagggcgccaaggttcagcgtccgctgtgggcttccaccggcaccaagaacgccgcctactccgactgcaagtacgttgacgagctcgttgccaagcacatcgtcaacaccatgccggagaagaccctgaacgctctggccgaccacggcaacggcgctccgtccatcgagggcacctacgaagagtcccacgccatcatcaacaagctggctgagctcggcatcaacctcaaggacgtcaccgacaagctggaggccgacggtgtcgctgccttcatcaagtcctgggattccgtgctggctgacgtccagtccggcatcgaccgcgtgaacgcctgagatttgacgactgatgcgtgtttagcgcactagttgattagctcacagaagccccgaccccaacggtcggggcttctttcgtttgttgctacagtggtacgagcatatgagagaaaggccgaatcgtaatgaacaaacttgtcgcacgccagcggttggtgatgaccttcaccttcttttcgatgttcttcggagcgggcaatctgatttttccgccgttcgtcggcgcgcaggccggttccgcgaccataccggcggccatcggtttcatcgtctccgcagtcggcctgccgattctcggcgtgctggcggtcaccttcgccggcggtttcgacaaactcgccagccgggtctcccccaaattcgccttgttcctcggcgtggcgatcatgctcaccatcggcccgtgctttgcgattccgcgtacggcgaccacctcattcgaaatgatggtggctcctttcgtaccgtcctcctatggctggctggcccaactcatctactcgctcgtgttcttcacgctggcgttcctgtttgcccagcatcccgagaaactctccaaagtgctcggccgattcatgggaccgttgctgctggtgctcattgctgtcctgttcatcgcctgcctgatccacggcatcggcaccccggccaacccgatgggcgactactccacaaaccagatcgcacgcggcttcctcgacggctaccagaccatggacctgctcgccgcgctctacttcggcatcgtgatctctgcgaatatccgcgcccaacaagtcgatgacgaatcgcaagtgcagaaggagaccgcgtatgccgggctcggcaccggcgtactgctgatcgtgatttacggcgcgctaagctacgtgggcgtggtgtccggcgccatcgccaccatcgaccccaccaaagacacgggcgcgaccgtgctcaccaacctcacctcatccctgttcggcacgttcggtactgcgttccttggcatcgtgttcgtcatcgcctgcctcaacgtatgcaccggactgatcggcacctgcgccacctacttccatactcggttccggaccgtcgccggccgaacgttgagctaccgcacctggcaggtcatcttcaccgtgttcagtttcatcgtgtccaatgccgggctaagcgcgatcatcaaggtttccgtgccggtgttgtccgcactgtatccgatcgccatcgtgctggtactgctgacgctgacccacaagtcgctcggcgcgcgattcccgcgcgtctacttctggaccgtgctgctggtgggcatcgcatccttcgccacctgcatctccagtttggtcgccgtcttcggcggttccatcggctggctggacgcggcgctggctatgctgcctttgcagcaataccagctcggctgggtggtcccggctatcctcggtgttgccattggtatcgccgatgctccgcgacggtagttcttcccggtctgtgccggagtctggcggtcggtcggtgatggcggctgccgcagtatccctcctataaagcggcatacagaattcctgtatgccgctggtctccgcccatctgccatagttatactggcatcatcgacgacggcgataacggcataaggtggggtgagtcatggacaccagtgatagacagatagcggaaaccggccggaatcgcgagcttgggctgattccggccatggtgatggcggttgttgcgacgctcagtggtgccggtgtatcgttcgcgccattatatgagcgcatttggggcggcatgatgttgcatccgaattgtccggcgattggcagaatgacctactatctctcgggccaagcaactgacgattatggagcctgcgtcacctcaccactgtggtttatgacggtgactgcgctgagtgttgtcgcgattctctgtctgactgttgcgggagtacagggcttttcgcgccatcggctctgttcggtgtttagtgttcttattgcggcagtggctgttgcgatcatattggtgttgagtgcgaataccaagattgtaacgttgtgggcgatgtatgcggtgacgtggctggtgcacgccatagtcacctcatatctgagcaacggttggatacgaatcgcgcgactgttgttcgtatggcagattggcgtgatgccggtattcgtcaccgaatattcagtatccgacgaggtcaacttcagcggcggcgcaaccatcgcttgcggacttggacttgcggcatatgcgctggtgcaatgcgcctctcttaccatcgactcgcaaaacaacagtaatcgaatcacgccagaacgcagtggtatacgggctacctccttgcacgacctgttccacaccatcagcatcaacgcatccgccatacgcaattgctctgttcccgttgccctgttctggtcaggtatcacgttctttacctacagctacaacactggtggacacaccgatttctgcccagcgctatcggcaactgacaatgcaggtcttgtcgcttattgcatcggccatgaagctttgggactgctgaccgtcgtgttgtgcgtgctgccattgttctccctgctttcggcgattacggccatcacgttggctgcacgcaacgcaaataacggcggtaacgctgccaatgccgatggctctcgaaattcagccgccgtgtgctatctgctcctggcaaccgcactgtccgccacggccttcgtcatcgccttcaccttggcatagcgcggaccaccatgccgcggttcgcgcgatcgctgggatacagcgcttcctgcgcacgacgcgacaccaccggcataagatctccttcatatcacgaaacaatcgagcgtgttcgtttgcgccaaggatcagctctgccagtagtagctgaagaagtcggagatctcccccatggtttcgcgcagcatgcccatgcgcggcaggtacaccacgcggaagtggtcggggcgatgccagttgaacgcgccgccgtggctgatgaggatgtgcttgtcatgcagcaggtcgagcgcgaactgctcgtccgagtggatgttgaagcgtttgacgtcgatcttcgggaagatgtagaacgcggccttcggcttgacggcggtgatgccgggaatctggttgagcatgtcgtagacgaggtcgcgctggtcgtgcacgcggccgcccggcacgatgtagtcgttgacgctctggtggccgccaagcgcggtctgcaccacggactgggcgggcacgttcgaacacatgcgcatgttggcgagcatgttgaggccctcgatgtagtccttggcaatgcgcttgttgccggacaggatcatccagccgatgcggtagccggcgatcatgtgcgatttcgacaggccggagaaggtcacgcagaacaggtccggggccatcgaggcgatggagatgtgctgcaggccgtccatgacgaggcgatcgtagatttcgtcggagaagatgatgagctggtgttcgcgcgcgatgtcgacgatctgctggagcacttcctttgggtaaagtgcgccggtggggttgttcgggttgatgatgacaatcgccttggtgttgctggtgatcttggagcggatgtcgtcgatgtccggataccattcggactgttcgtcgcacaggtagtgcacggcggtgccgccggccaggttcacgcaggcggtccacagcgggtagtccggggagggcacgagcacttcgtcgccggtgtcgagcagcgcggacatggacaggttgatgagctcgctgacgccgttgccggtgtagatgtcgtcgatggtgacgttcgggatgttcttcagctgcgcgtactgcatgatggccttgcgcgcggagaacaggcccttggacggcgagtagccttcggtgtcggtgagctggtgggccatgtcgtagacgacttcgtccggcgtgcggaagccgaagggtgccgggttgccgatgttcaatttcaggatgtgggtgccgttggcctccatgcgcatcgcctcgtcggcgaccgggccgcgcacgtcgtagagcacgttgtcgagcttgtgcgatttgccgaaggtgcggcggcggcccacgggaatctcgctgtccgtctggggcttggcggcacccatggcaagcggtgtggcggcgtgttcgccgtccgtgacgctgttggatgcgtccgagttcaattgcgtggtggattcctcgccgcgcagccaattcgtgtcgacgtccagttcgctggccaggaattcgagcacgtcctcgcggggcatggtcttgccggccacatattggctgatgtggctcttgcccatctttacgccacgatgttcggcggcgtgcaccaaatcgacctgcttcaatcccctgctgttcatcgcattgcgcagacgttccgcaaacaccgatacgctcatatccttatgcctccaaccgggagttcaatttatcttttgaacaacggttcaaagcatacccccggttcaacacaagttcaattttggcgtgttctcgagtctcgaccggttcaacccaactgcgcttcaatccattgggcgacgccgtcctcgttgttggacgggcagatctcgtcggcgacggacaacaccttggggttcgcgttggccacggccacgccccggccggattcgctcatcatgttgatatcgatgaggtcgtcgccgaaggcggctgtctgttcaagcggcacgtccagtcgctcgcacagcaggtgcagcgcgtgctccttgttggcctgcgggttcatgagcatccacatcacgccttcgctgatggagatgtcgaagtccggcggaatcagcgcacgcagctcgttccactgttcaggttcggggaagatggtgattttgtccgccacgccttcgggcacgtcgtggaagttcgtgtattggaaggcctgagttttccaatacacgcgcacatcgaagttggtgtagcgcacgtcgttcatcacgatgccgagcttcaggccgggcatgcgatcgagcaggaacagacagacttcgcaggcacgccgtgaggagaagccaatcttgatcaaatggttctcatcggccggcgtggcacctgaggtgagcaggtcgaagtcggagtgggccgggtcgaaatcgatgagggcgccgttcagatagattacggcgtccaccggcagtttttcggcgaactggagaccggtactcaccggccgcgcggtggcgatggcgaattgcattccggcatcgtgcgcgcggttgatggtgtcgatgctgcgctgggtaatgaaccggtcctcgaatacctcggcgtcgtgcagcaacgtgccgtcgaggtcggcgaccagcagtcggggttgtttcggcgtgatggcgtcgagaatcacagcagcccctcacagtgttcacgcacgagttcggcggaatggtgcagtttggcccgctcgtcctcgctcagatcgagttcgacgatctcgttggcaccattggcgcgcagttcagtggggacgccgaggaacacgtcatgttcgccgtattcgccgtccagcagggtggagacgggcacgatgcggcgttcgtcccacaggatggtctgtacgatgccggccacggtggaggcgatgccgaagttggtgccgcccttggccgcgacgatctcattgccacgggtgcgggtcttctcttcgatttcggtggtggacacggaggcgaaacggtcttggttgtcggccaggaagcgggcgaatggcttgccgccgagcgagacggtggaccatgcggtgaactgggagtcgccgtgctcgcccatcacgaagccgcccacgttgcgcgggtcaaggccggtctcttcgccgatgatggtcttgagacgcgaggtgtcgagcgcggtgccggtaccgagcacctgggtgcgaggcagaccggaacgtttccaggcataccaagccatcacgtcgaccgggttggagaccatgacgatcacgccgtcaaaaccggaggccatgacgttgtcgaccacttcgcccacaagacccacggtgaagccgagttcggccatgcggttggagttggccggcggcttgcggcccacggtgatgacgacgatgtccgcatccttgcagtcggcgtagtcgccggcgcgcaccttgacgtggcggtcctggaattcgctgccatcatcgaggtcgcgggcctcccccagggccttggcggcggaacagtcgatgagcacaagctcattgcacaggccgtgcgtgacgatgccgaaggcggcggtggcaccgacccggccggtgccgacgataacgactttgttgcggttcatagtgaccatggtgatgtcctttcgtaatactcgatagaacgcatacgacccatgaccgacggtaacggtcatgggtcgcgagcgacaagtctatatggcgtgcaagccgatcagccgaggttgaacttggtcatcatgtcgaggccgatgatcaaggccacccacaccagagcgatgataacggtccaacggttcaggttcttttcggcgacaccggaagtaccggcgttctgggtcagaccgccgccgaacatgtcggacaaaccgccgcccttgcccttgtgcataaggatgagcagggtcagcacgaagctgagcagcacgacgatgacttgcagcgtgatcttaagagcggtcacagggtacctccggattgattggactgttgaccagcatagcgcacacacgggaaaaccgtggtattagttccgtgatttcgtggatttcagtgccagtcgagcgattttggcgagttcctcaacgtccagggccgcccctccgatcaggaagccgtcaacgtcgggctgggaaatgagttccgccgcatttttcgaggtgaccgatccgccgtacaggatacgtacgctatcggataccttcgtgccaaaagtggtcttcaaatcgttgcggatggcgtttgcggcatcctgggcggattgcggagtggccaccatgccggtgccaatggcccagacaggttcgtaggccacgatgagtttggcggcttgttcttcgttgagatcgcgggtgacgtctcgtacctggcccacggcgaaatcgagttcaatgccttgacgtcgttcctcgaagctttcgccgacgcacaaaatcggctgcatgccggcggcgagcacggcacgtacctgatcgacgatattggcgtcatcttcaggatggtatttgcggcgttcggagtggccgacgatgacgtatgagcagccaagatgggcgatcatgtccgcggacacatcgccggtgaaggcaccttgggtggtcacggaaacggattgtgcgccgtaggcgacatggagcttgtcggcttcgaccagcacctgcacgctgcgcaatgacgtgaacgagggaaaaagcgcgacttcgcagcgtttaaagtcgaagtgagcgtcacgcaacagccataccagcttctgcacgaagtaagtggcttcaagatggtcgaaattcatcttccagttgccggccaccaacggaatgcgtttggacgccatatgtttcccttctaaaaaaaacgtagctcccctcaaggaggggagctagaaaatggattactcaagcaccttcaggccagggagctccttgccttcgaggaactcgagggaagcgccaccaccggtggagatgtgggagaagccgtcctccgggaagccgaggttgcgcacggcggaggcggagtcgccgccaccgacgatggtgaacgcaccgactgcggtggcgtcgaccagaccctgggccacggccttggtgccggcggcgaactcaggaacctcgaacacgcccatcgggccgttccacacgacggtcttggagtcgacgatcttgtcgtggaagagcttctgggactccgggccgatgtccagacccatcttgtcggccgggatggcgtcggcggcaacgacttccggagcaaccggggtgtcaccggccgggaagccggcgttcacgacgacgtcggtcggcagcacgagctcaacgccgttcttctcggcggtctcgatgtagcccttgaccttctcaagctggtcctcttcaagcagggaggtgccgacctcgtagcccttggccttgaggaaggtgaacaccatgccaccgccgatgaccagacggttggccttgtcgagcaggttctcgatgacgccgagcttgtcggagaccttggaaccgccgagcaccacggtgaacggacgctccgggttctcggtggccttggacaaggccttgacttccttctcgaccagcaggcctgcggcggccggcagatcggcggcaacgtcgtagttggagccctgagcgcggtggaccacgccgaagccatcggaaacgaaggcctcgccgagggcggcgatcttcttggcgtaagcggcgcgttcgtcggcgtccttagaggtctcctccgggttgaaacgaacgttctcaagcagcacaacgtcgccatcgttcatggcggcgaccttggcctgagcgtcctcgccgtaggtgtccttggccagcggcacgttggcgccgagcagctcgccgaggcgggcggcaaccggggccaggctcagctcaggaacgaccttgcccttcgggcggccaaggtgggccatgaggatgaccttggcgccttcttcgcgcagggtcttgatggtcggcagagcagccttgattcgaccgtcatcggtgatggtggtgccgtccagcggaacattgaaatcagcgcgaaccagaacgcgcttgcccttgagatctccaaggtccttgagtgtcttcatgaatatcctttccttgacgaatcgcacgtcaaagtggccaattttgccactttgcatattacaggcattccggaacaaaacaccgcattcgtctactgactgaatgcggtgttttgtcacatcgttgtcgcgttttgccgaataggcacggcaaatcggattgtcgggttacttgccttcggctgcgcgagccttctccgtcttctcggcaagttgaagcagtcggcgaattcggccggcaatcgcatccttggtgatttgcggttcggcgatcttgccgagctcctcgaggctcttgtccacgtgatcgatgcgcagctggccggcctgacggaggttgtccggaatgttatcgccgagtacttcgaaagcatgctgcactttttcgctggcttcggcggcggccttggcggaacggcgcatattggcgtcatcgaagttggccagacggttggccttgccgcgggcctcgccatcggaacgcttgccggtccattcgcgagccgaacgggtggcgcccatgagcttgagcatgcgttcgatggcgtcgggatccttgagtgtcacgcgctcggagctacgcagcgtgcgatgcttggcctggatgcctagacgacgggccacgccacacagggccatggcggcctcttccgtggggcaagcgatttccaggaagctggccttaccgggatcggacaggaagccacgggccatgaaggcgccgcgccatgccgctttgatttgggcgatggatccgttgaccacttcagacggcagtccacggacctgctgcttgcggcggtcgaccagtccggtctgcaaagccaaggccactacgttgcgggtgacgagcaccacgtaggtctcgacagggccgttcggggtctgacgtgtgaggtgattgacctcggcttcgtgcccgaacgtgttcctcaacgtgttcttcagccattctgcaacgtcaagcgaggtgaatacggcttggataacgtatgtattctgtaccggtcgaagaccgccgccaaaacggatcatggccgcagcttgggccttgatcgcggctggcgaatcgccttcaaaggctgccaactcgcttttgacatcgtccagaagagccaagatctacctcctacagtcccgttcttctcaatgcttcaggcgcttcgtgccgttatctgctgtcacacggtcggaagccatcggctttctgtgatacctaatctggtggacaagcgaacccgtttgatacgtattatgggccctgctttctcgcagtgtggtcaccgaacacttgcccgatgaccgctcgacgcctgcttacgatgagtgacgcttgtgctgttctctcgcggaaacggttacgttgagcccatgtgcgcgtaagcggcgagccagctcttcgctcatcgccaccgaccggtgctgaccaccggtgcagccgacggcgatggttacgtagtgcttgtcttcctgggcgtatccttccaacgcaatctcgatagctttctcataagcgtcgagaaattccttggctcccttgctggaaagcacgtagtcggcgaccggcttgtcgtgcccggtaagctcgcgcaggttgggcacccagaacgggttgggcagaaaacgcacgtcggccacgaaatcggcgtcgatgggcataccgtatttgaagccgaagctgaagatgtgtactgccacggtggtggggccggagccgagcatcgcctcgtagagtttggtggacagctggtggatgctcagggagctggtgtcgatgacccagtcggctcgttccttgaggtcttccagcaggtgacgttcctcaaggatgccgtcgatcagtcggttgccgtgctgcagcgggtgcgggcggcgcacggattcatagcgcttgatgagcacttcgttgctggcgtcgaggaacagaatacgggttttgacgccgagatcatccagatggccgagcacggcggccagctcgtcgaaatagctggagcgcacgtcgatgacggcggcaagcttgtggacgcctgactccgatccggaaccggaggtggtcatcatgtcgacaagcgggataagcagtttgggaggcaggttgtcgaccacataccatcccatgtcttccacgcagtcagcggcatgagagcggcctgcgccggacataccggtgatgagcagcacttcgaaggcatcaagcggggtcggctggttgtccggagtcgatgtggatgtcgcggaattcgccggcgcattcgtggcggccgcctcgccggtatcgcggttcgttgtctgttgattcattacagcgcctcctcaagagctttgcgcatcgcgatctccagctggtcgtcttcggtggtggtgtcctgcagacgctggtcggcatcgctgggcgggtcgtcatcccagataccggtcatcagcaatacctgtacgagagcttggtacagcagcatttcttcgccgccgatggcgtgaccgccatgagcgcgccaggcttccatgagcttggtggggcgtggatcgtagatcacgtccaacagcagtccggagaatggctcggttccggcatcggcgagggcatccgcgacgttgtcggccgcgtgtccgggaatcgtgttgatgacataggtggcgttgcgggctgcctcaagcaggacctgatcgtcgcctaattcgatttcgttgtacgggttatgcacgttgacgaacttttcggccactggtttaagcccggtgttttttccggggtgacgggcggcgacgacgatatggccgatttcgggcatcatgcagcatgcggccaacgccgaagtggcggtgttgccattgccgatgatcagcgcggtgccgcttctcgacgcggtgtggtgttcgccgagttcgcgattggcatggtcgaaggcgagttggatgccgatgacatcggtgttgtatagcttgatgcccggcttgccgttcggccaagcgggatcatcggcagccacgctccagtcgaataccgcggtattcgccaccttcagttccttggcccacaaattttccggaacaccgtacggttggatggtcttcttcaacggcatggtcaggctcaggccagcccacgtcgagtcaaggcctttgaggaaagcgtcgaggtcgtcttcccccacctcgtgcttgtcgtacagccaatcgtcgagtttcagcgaacggtaggccgcgttgtggagcacgggtgacaatgagtgtgcgacgggtttgccgagtacagcgcaacgatgattggccatatcccctccttgatgtctgttcccatgctagccgacactttgcttcgaatatgtcaaccacaggccccgcaaccgaaaatttactctgggctgctggaccgggccggctcactgctcgtgcagcgcggtgtacagcgcttcggctttggcgtggccgatgcctttgaccttctcgaagtcctcgacactggcttcgcgcatggctttgaccgagccgaagtggttgagcagccgcttctggtagctttcgccgatgccgggaatctcgtcgagcgcgctgcgcagggcgcctttgcgccgctgctggcggtggtaggtgatggcgaagcggtgggattcgtcgcgcacacgctgcagcagatacatgccttcggactggcgtttgaggatgatcggatagtcgtcgtccggcacccacacctcttccaagcgtttggccagtccgcagacggccacgtcgttcacgccacagtcctcaagcgccttggcggcggccatgacctgcggcttgccgccatcgaccaccaccaggttcggcttgtaggcaaagtgatgctggtttgtgttctgctggacgatgtcgggcggggactcccgcgcatcgttctgcactccgaccggcaccgcgtgccccttgccactgatgtcggaaccgccctcaccattgtcgttaccgttcgcagcgattgtctccgccgccacggcagtggtcatcttgccggcggccgaggccacacgctgttccgcgtcgatgctttcgccggagtcgccggcgatgttgccgtgcttgaagcggcgggtgagcgtctcgtaaagcgcggacagatcatccaccgcgcctttgccgtccttgcctcggatggcgaagcgtcggtattcggatttcttggcgatcgcgtcttcgaacaccaccatggaggccacctggaaggcaccgcccacagtgttcgaaatgtcgtagcattcgatgcgcagcggggcttccgcgagtcccaatgccttggccacatcgttcatggcctgggtgcgtgcgcccatgtcggagatgcggctcatcttgctgcgttgcagtgcttggctggcgttctcgttggcgcggtccataagctgcttcttgtcgcctcgcgaggccacacggatggtcaccgctcccccgcgcagattggtcagccagccttcgagttcctcacggcgggccggttcgacgggcacgatgatttcgcgcggtaccggtgcgatgggtgccagcaggtccgcgcgcccggtggtctcctgacgggtgttgcgttctcgggtggcctgggcgcgtgccacagcgtccgtggccgtgatggtttgcgtggagccgatggcctcgcgattggtggagatggtcgcggccgactgggggtgattgtccccggcggcgtccgaatacacctgcaccagaaggtcggccatcaagtcggcgtcatcgatgtcctcaactcgttcgacgctccagttgcgttcgccgcgaatcgaaccggcgcgcacataaaaagcgtgcacggaggcttcgagctcgtcgctggcgaagccgaacacgtccgcgtccacatcctggtcgaagacgacggcgttctgttgcaccacggtttccagcatttggatctggtcgcgcaatcgggcggctttctcgaattcgagttcggcgctggcctctttcatgtcgcgggtcaactgggcgatgtatggccgtccgagtcgtccggtcatcacgccgaccagctgttcgcacagccgccggtgttcgtccgcttcaatgcggttcacgcagggtgcggagcatttgccgatggaagcgaacaggcatggccgtccggtcagttgcgccttatggaacacgttggtggtgcaggtgcgtaccgggaacgtgcgcagcaaccggtcaagactgtgccgcaattcccacactttggcataggggccgaaataccgggtatcccgccgtttgcgcgaccgcgtgacccacacgcgcggaattcgctcccccgtgctgaccgcgagatacggataggtcttgtcgtcgcggaactgcacgttgaaccgtgggtcgaattccttgatccacgtgtattccagcgtcagtgattccagttcggtggcgacgaccgtccactccagactgcgtgcggtcagcaccatggtctgcgtgcgcggatgcagcagatacagcggctggaaataattggtgagcctgttgcgcaggttctttgccttgcccacataaatgacgcgcccttccccgtcgcgccatttgtacacaccgggtttggcgggaatatccgaggtcttgggtcggaacaggtcgcgagaatcccccagcaaaggtgccccattcgcattcaccttcgccgtcgtttccccggcacccacagctacgctttccgacattaacgccgccgcagtcttccgccactcatccggactatgccgctcaatatcgttcgtcataatcctcctcgctattaagccaatcatcagggattgggtgggttggggtgtgtgttgctggaccgtaaagacttggcctgagcggcccggagcgtgtccagcaacacacaccccaacccacccgaggtcagctgcaatggaaggctaaagcatgggtttcaggaacttgccggtccatgaggcttcgcattcggcaacctgttcgggcgtgccctgcgtgacgatggtgccgcctccgtcgccgccctccggaccgagatcgatcagccagtcggcctccttgatcacatccagattatgttcgatgacgatgaccgtattgcccttgtccaccagggactgcagcaccttgagcagcttgttcacgtcttcgaagtgcaggccggtggtcggctcgtcgaggatgtacacggttttgccgtcggatcggcgctgcagctcggtggcaagcttgacgcgctgcgattcgccgccggacagggtgggtgcgggctggccaagtcggatgtagccgaggccgacgtccacgagggtcttcaggtatcgggagatgccggtgtacgccttgaagaagtcggcggcctcctcgatgggcatgttgaggatgtcggccacggtcttgccgttgtacgtgacttcgagggtctcgcggttgtatcgtttgccgtgacagacctcgcagtccacgtagacgtcgggcaggaagttcatttcgatcttcagcgtgccgtcaccgtggcaggcctcacatcggccgcctttgacgttgaaactgaagcggccggggccgtagccgcgcacctgggcttcgggagtcttggcgaacagggtgcggatcttgtcccacacaccggtgtaggtggcggggttggatcgcggcgtgcggccgatcgggttctggtcgacgtggatcaccttgcgcacctggtccacgccttccacgcgcgtgtggcggccgggtacgatgcgtgcaccgttgagcttgtcggcgagcaccgggtagaggatcgtgttgaccagcgaggatttgccggagccggagacgccggtgaccacggtgagcacgccgagcgggaagctcacgtcgatgttcttgaggttgttctcgcgggcacccacgactttgagcacctgggtcttgtggatcttgcggcgcttggcgggcacggcgatctctcgccggtgggcgatgtagtcgccggtgatggagcgcttggcttctatgaggtgcttggcggggccggagtagatgacttcgccgccgtgttcgccggcgccggggccgatgtcgaccacccagtcggcgcggcgtatcgtgtcctcgtcgtgttcgacgacaatcagcgtgttgccgagatcgcgcaggtggtgcagggtttcgataaggcgttcgttgtcacgctggtgcaggccgatggacggctcgtcgagcacgtacatgacgccgaccaggccggagccgatctgcgtggcgagtcggatgcgctgcgcttctccgccggacagggtggcggccgcgcgcgagagggtcaggtagtcgaggccgacgtcgttcaggaagccgagtcgggccttgatctccttgagcacttcgccggcgatcagctgtgccgagccttcgagtttcaggccgttgatccaggcgagttcgcgtacgacgggcatgtcgcacacgtcgaagatggattttccgtccacggtgacagcgagcacttcgggcttcaggcggcgtccgtggcagacctggcagggcacttcgcgcatgtacgactcgtagtattcgcgcatggactgcgaatcggtttcgtcgtggcgtcgcatgagcgtgcggatcacgccttcgaagccggtggagtattcgcgcaggcgtccccagcgattgcggtaggagacgttgaccttgaagtcgtggccgtagaggatgtcgtgcttgacgtcgtccggcaggcccttccaaggggtcttcatggagaagcccatttccttggccagaccttcgaggatgtggccgtagtactgggaggtcatcttggtgccgctccacggttcgatgacgccgtcggccagtgacttgtccgggtcggagatgatgaggtccgggtcgatttccagtttgaagccgagaccggtgcaggcggggcaggcaccgtagggggcgttgaaggagaaggtgcgcggctcgacctcgtcgagttcgagcgtgtgcccgttcgggcagctgcggtgttcggagaacggctggcggcgggccgggctgccttcctcctcgtccacgaagtcgatgacgatgctgccgttggcgagcttgagggcggtttccaccgagtcggtcaggcgttggcggatgccgtccttgaccacgagtcggtcgaccacgacctcgatggtgtgcttcttctgcttggtgagtttgatgtcgtcggacagctgcgtcatctcgccgtcgatgagcgcgcgggcgtagccgtcggagcgcagcagctcgatcatatccacgaactcgcccttgcggcccttgaccacgggcgcgagaatctggaatcgcgtgcgctccgggtagccgagcagcgtgtcgacgatctgctgcggggtctgggaggcgacgggctcgccgcattcagggcagtgagggatgccggtgcgggcgaagagcagtcgcaggtaatcgtagatttcggtgatggtgccgacggtagaacgcgggttgcggttggtggtcttctggtcgatggagacggccgggctcaggccctcgatgaagtcaacgtcgggcttgtccatctgacccaggaactggcgggcgtaggcggatagggattcgacgtagcgtcgctggccttcggcgaacagggtgtcaaacgcgagcgaggatttgcccgaaccggacaggcctgtgaacacgaccatgcgattgcgcggaatcgccaggtcgacgttcttgaggttgtgttcgcgcgcaccctgaatcgtgatcttgagatcgttcgggatgtgcgagatatcagctaccagcgaaccatcgtgttcaatcagcggcgcctttttgatctcccggctcaggaaggagtcgctggtcatcaccttttcgacgatgacctcaccgttcttgcccttgccggttttcgcgcccgttgcgcttgttgcgcgccttgcgccagtctgcattgccgccacagccacaccccaccttccatctcaccgttcccgcgcgcacggtcatgcgcgcgccaaatctgtcccaaggatacccgaacacacgaccaaattcgaacgcttgttcgatggcgtgtcaggccggaaaactgaaccagagtatgcaaaattccggaccatcagtggaccgaaacgcaagagccggcccccaagatactcggggcgtccggctctcacttccatttccccagcggggttggcttaccatgaagtatacacggttttaggacatcaatcactgtcgatgaacactgttcgaacatggccgaggaattcatcgtatcttccagtaccggcctgggcatcaccgtacgctcctagcagctgatcagggagccatagccttgcatcagtctcccctgcacagagttcgacacgaattggcccgataaatctgcggcttctcaatccatcgatgaaacggatatcgttcccgtcctgtgaaatctcgcgccgttcaagcacaagcgtgtccacgttgtattctgtttccagcagaggcagaagacgttccaaacatttacggcgagcgcgttcggcggtattccactggctcattggtaccgcagccacaatgacatgatcaatgtccattgcagccatggcatcaacgactttgccacgcaatgatggccgcatgtctcgccagtgcaatttccttgctcctttgggcttaagcaacgccaatctttgccttgtttcggtttccgtatcatcacatacgcatgcgcccatcaagtacataggcgagggaactccggttttccgcacactctcgtcaccccaagcggttgccatgtttgtcccttctcgcgcaacgcaaaacaacagttcgatagtatcggatagcagtgccggaccttgcagctatgcaatgccgttgcattattaatcggaaggcataatgtgaaacgagaaaaagctaagctgttctagctcttggcaacatccccaatcactcagcctaaatcgacaaatcctgattttcaatggactccacggggatgccaagcttgcgtaattcgtcaactgcatcacgcatgggaatgcgttcctgttcgatacgccgataagcgatggttttgtcagcacacagtcgttcataaagacgtcgctccgccgattgaaggccgggcgtcggcttaggctcccgcatagcaatcttcgcgctgcgttcagtacgatcggtaccaaatctgtggtaccgatcgtatgcatcgcaatccatcaggatggagtcgcattcgatacctgattcacgtaatgtcgaaagtatttccagtccatccgcatccatatcaccccaatacacgatacgcatgtcacgcagtgcaggaaccgcaggtacagcatcgcttacagcgcgaccagaaccccatatgcagatgccctgcgcaatcggcggcatagtctgatacgtgtctttgttctcaacgatgacagcatatttaatgccggataacgcttcgccttcccacggacaccatatgatgcgttcgagctcagcatcgtcgcggaccggatcgagataacggaaccgcagttcggtcggccgttttgacagacccaacgtttcgacaccgagcagtcggcaaatggccttacgacgattggtttttgactcattcagccatttgccgctgaatcctgtcagtggaatctgtcgcggcgtcataccggtcacgtcatgatgcctgaaatatcgaactgcgctgacaagcagatcgaagtcgtcaggctgttcatggcctgtcatgcgagcggccgattcgattgtttccggagcaacgtcacaagcagcaaccagacatgctatgcggcggcgcgcttcgcgacattccgccgccagcgtacgaccaaccacacgcatggctattgattcgtcaggaacgacgactttggagatcagctcgacagaggtgcctatggtgcgatgcttggttatgatttcgcaaccattcttgcttgcccattgccgtatctcattgttgttgtcatgcaccgcaatcgcattggtttccaaaaatgcttggtccggcaatcccaccggcacgggaaatggccatgccggttcgatgtcgtacatatgtgaacgcatatgtttcttcacgcatgtggtgatcgcagcgatgtctttcatgccggccatagttcccatcacctgctttcgaacatcgtcgagtcgaaccgaatcgtcttaataccggcgacgccaggactgctcattcggcaaccccgtcatccttcaatatatccgacgatgattcatcgtccatgtcattctgatgcagcacggcctcgcgcagggaggtgaggccggtgtcggggtccttgtaggtcacgtaggccttggtggagacctcgaggatttcgccggtcttgctttccggggcggagacgatgacctggaatccgaggcgcggcagcaccgtgagggcgcgctgcgtgtaacggccgtcggccttgatgagcgcctcgtcgaggaacagcgtggtgtacgagggctcgctggtcaggccgccgccgagcaggtagatgagcgccgcgccgtatacgaacgaggtgagctcctgcaaggcgccgcccgaacggccgccggtggaggtgatgcgttcatccgggccgtcggcatgatgcacgatggcgtagaaggacgagcggcagcgcgggtcgaggttgcgggcgccgtagcttttcacgccgttcgcgtccttgacctgcgcgagttcggcgcgcagcagcccgaccatcggcgcgcaggccgcgaaagccttgcgcgaggcgtcggaatcgttgacgtcggcggatttccaatcgttcagggtgccgatgacacggatgagctgcgcccagaaggtgcgctcgggacggcgcacgtccgcgtgcagggacaggctgccgtgcttgggaccgaactgctggcctttgagcatggcgttgatgcggtcaagctggtcgtggatgtcgctggcatccgtgtcgatggcgcgtttgatggtcaggaagctcctgaacagctgttcgaggcagcgccggtattcggcgtcggtggcggcaaccgcggccagctgggtgaggctggcgagttcgtcgagatagtaccggtagtcctccacgctggcggtcagcgaatcatcgtcggccgcgtagagcgcgatgtaggtgctcattttcgattcgacgccggtgcgtgaggcatcggcctggccgttcagcaggttgatgcgggaggccatgtccttgccgatgccggcgatggtgcgttcggggaagctctcccccggcgcctgcgttcctgccgcgcccgcgccgatgatcatgtgcgcgcgcatggcggcgtccgccagtccggcgaatcggttgtcgtaggattcggcgagcgccgccgtgacttcgtccggcagcgggccggacgcggcgtcatcgtcattgtcggcggtggcaccggcggcgtccgtcgtgccggtgtcggcatggtcgcgcagccagatgagcgccgcttcgacggcgctgccggcgcgggccgcggcctggtcggattcgatgcgctggcgttccacacgatcgagttcggcgttcagttcgtcgcgctgtttggcgagttcggcgagcttgggatcgtttttgatggatgcgatggcgtcctgcgtgtccgtgatggtccgttgcgcgccggcgatgtcgatgcgttcccaggacgtgtaggcgagctggttggccagttcgagttcgcggtggaggttatcggactgtgttttggcggccgtgtagtcggtgtcggcttggctgagcgcgttgcgggcggcgtcgacctgcgctgcgagcgcgttgaggtaggtttcgttgacgaatccgatgacctgggcgcggtctttggtgccgtgctggccgcgtgcgccggatttgatctgaccgccggcctgcacctgacggttggtgcggtcggtgtcgtcgatggcggtgacacatagggcgtcgaatcgttcgtcctgggtctgcgagcgcagccagtcggcgaagggcgagtcgtcgcggtagcgcagtttgccggacagccagtcgccgtcctgttctccggtgagtatgttcgcgtgcgcgccggtgtcgtcgtagtggcgtgcggtgtccacgaactgccaggtgcgtcggggcatggtgcgcgggtcgatggtgctgactttggcggcgaagccctgttcgtggcgcttgtcgacgaggatggtctgggcgatgggcgcgtaggcgacgttcatggcgagacgccagtcttcctcgtgttcgttcacgtccatgagttcggccacgtacggcagttcggcgggggtgagtccggtggcgcggcagagcatggcgcgggtttcgtccatctgctgggagatgcgggtgcgctgggaacgttgccggtcgaagtcgcgttgcagtcgttcgaggtcgccgcgtgcaccggcccgcgcgttgatggcggcggtgagggcttcctcgcattcgccgtctcgtttgttgtattcgcgtttgaagttcacggcgttgatgcggcgttcgttccaggcctgttcgtcgccgggcagcgtctcgccgatggatgcgaacgtttgttcgattcgtgttcggttggcttgcacgtcttcgagggtgcggcgggcctggtcgagttcgagttcgagtcgggtcaggttgccgccgtccagaccctgcatctggcctcggatcatgtcgagacgggtgcgcaggtcttcggttcggcggcgcagcagcttggcttccgcctcgctgttctgttgttcggcgcggtcggcgggcagttggacggcgacttcgccgcgcatgcgggccaatgcccagtcgcgcagcacggccggtaccgtgccgtcgacggccggcttgaccggttcgaaggcgcgggccttgccgcgtgcggcggcgtattcgccgtaggcctgttggatgccgcgcagcgtgtccatgcggcgggtcttctcgtccatggcgtggaagttctcgtcgtaacgttcgtagtcctcgaccgtggtgcgggccaggtccagggcttcgggcacgccgagcacgccttgtttgaagatgtcgtcgagccgggagggcgcgtcggcggactggatcttgtgcagcagtcggcaggcggcctcgctcaggcccattgcgctccagatgtgtgtgtggaacgcttcggcgctggggaatgtgaggcagtcggggtaggtggctttgagctgggccggcgtgaacggggcgtcacggtattggtccatgcgcctggggtccacgggcttgccccagaccacgtactgtcggcgcacgtcgccgcggccgtcgccgggcatcaggtagaggaatttggcgcaggaaagcacctggccggtggtctggttgcgataggtgtccacgatggcgccccacacgggttgcggtgcgccgttctcgtcgcggccgcgcaggtagagcggctcgtcgccggtttcggtgctgcccacgccgaccatgccgcgcaggtaggtgtagtcgctgcgttcggagcggccggagttcgaggccttgttgaacggcgtgccggttgggtacagcagggagatctgcgcgtcgaccagcgtggatttgccggattcgctggcgccggcgagcagggttaccggcagcttgtggtccgtggaggggcggaattcgtggtagccctcataggagccccagttgatgagtcggcgggattccagcatccaccggtccgcgatcatctgcacgtctgtcgcctgcatcattcggctcccttctcgtcgtcatcgtcatcttccgtgtcgccgtcgccgtgttccgcgacgtcgagccaggtgtcggccagttcgcggtcgagcaccacgggcacgagcggcgtgatctggtacatggcttcgtcgtccaggcgcaccaaatacccgtaggtgatcatcgcggagacgatggcgccgacctgctttgccacgccttcctcgtcgttgcgggcggccagatagccggcgccggtggcgagcgcggcgcggatctcctcaaagctgacgagccagtcggcggggtcggcgtgcacgttctcgtattcgaggacgcggatgcgcaggaaggcgagcagcgcggcctcctcgcgtttgaggctgacacgggttttgagcgagcgcagggtcacgtcgtcgccggccacgggcgtggcgtacatgatgcggtagcgttcgttgatcaccaagtcgagcaggtcgttgttcagggagcgtacgacggcgtcgcggttgtcgagcacggtgtcgtaggtgggcccgctgatatagcggtcgcgtttgagggcgatggcggccatgcgtgcctcggccggcatgtcgccggtgtcgccttcgaacagggcgtacgggttggcgttgtccatatgctcctcgtgttcctcgtgttcctcggccacggtcatccttcctccacaatgatgctcagctcgtccatgtcggccagcaccggtctagtgatccagttccggggctcgccgtcgatcgatacgcaatgccaggtcgcagtatcgccgcgctgcgccggggccggctcggtggcgatgtcgctgtcgaccccgacgccgacgccgtcagtggacggctcgtcggcgatggcgttgccgcttacggctcccagcccgcccaggaagccgacgatctcgctttcgcggcgttcgctttcgggcagccggttgaagctggcggcgatgtccacgagggttgcgccgggcctgtcatcggacctgtcaacggtcaccgggttgcgccggatgaggctgaccatgcgcaggagtcgggggccgccgctgttgaccatgtcccgcagatcggccaccggagtcgactgcggggcttcggcggcgaggtcgctcaggccgggtgcggtggcgcgggtcatggatttggccgggcgcatcggcaatggcgcgaacagcgcgtccgaggtggccgtgtcgtacgggcgcgaggcgtctcccatatgggttttcgcatccgcgttgaggcgcgcgtacagtcggttcaagcgggtgagcatcgtacggtagcgagtgtcggtttgctggcgcacgagccggctgatcgcctcgtcggagacgcgcatctggcggcgcacggcttcgatgccgtcgtagatgcgggccagttcgtcgcggatctggccgagcagcacgccggattcgccggccagatacggggttttggcgatggcgcgcagggcttcgtcgatttgctggcgaccctcgtcggtgatgatcacctggaaggcgtcctcgaagcggcggccgctgtctgattcgcggaacgagcggcggtattcatcgtggtagcgggtcaggttctcgtccacgctgatgtcgccggcctgcatgcgccggcgcaaggcgtcgccgttgtcccgctcgtcgagcacgagttcgcgcaggtcgatgggcacgccgcgcagcgtgttgtggatcacggcgatcacgtcctccacctgggcttcgctcagcgtggcatgctgcttgccctgttggatgcgtttgatctcgtgcttgcgttccttgatttcacggttgaggagtttgatgcgctcgccggggtcggcggtcagctgcatgcgcgcgtgctcgatttccatgatgatgctgttggcctgcgcgccggacagggcgcgtgattcgtcttcgagcctgctcagcgcctcgatggcgcggtgggcgcgggccgtcaaacggtagagaaatcggtgtgaggccgcatcatgcgagttggcgagccaggcgtagtcgccttcgccttcacgggtcaggtcggcgaggatctgatgagcggcctcggcgaaggtctggtcctcgcgcggcgcatattcgccggcgtcggccagactgctcagactttgcgcgaaccgctcctccacggtctcgcgcggcagctcgccggtgagcgggtcgaacgtggaacgcagcagcgacacgtacagcatcgcgttctggcgcaacagcaaccgcaggacgcccgtctcatacaccggtcgcagccgttccagctcccgcatcacatcggccacagcatgcctccctctgtcgtgaccgcaccatactagccgatagccgcgaaccacaccccgcccacgccacgcccttcgcccccccccacagggaggggcgccaagccatgctaaaaatcacagacagactattgcctttgcgggaaatcatcgttagattggcgagaggaatattgtcaatgcatacgaaacggaaaacatcgtgaccgcaccgaacacgcccgccgaaacctctgaccagctcaacaagcccgccaaatccggcaaactggaggtctccgacctcatcaccatcggcgtgtttgcggccctgtacttcgtgatggtgtgcatcgccacactggtgagcaccctgttcaccagcggcttcggctccatcttcctgcccgccatcacggccctcatctccggctgcgtgtacatgctgctggccgcacgcctcggcaaattcggcggcatcaccgtcatgggcgtgatcatcggactgttcctgttcatctccgggcatttcgtgctttcgttcatcgccagcatcgtgttcccggtggcggccgacctcatcgcgcgcgccggcaagtataagagcaaggcgctactgctcgtcagctacgtggtgttctcctacggcctgaccggcccgatcctgcccctatggttcatgaaggacgcctacgtggcgagcctgcaggcgcgcggcaaggacgcagcctacatcgacggcgtattcgccaacatcaacaccggcacgttcttcatctcgatgatcgcgattctggtgtgcgcggttctcggcggctggttcggccggcgcatgatgaagaagcacttcatcaaggccggtatcgcctgatgaatcctgcccgccggacgctcgatccgcgcgcgaaactctaccttctgctggtggcgaacctcatgctgttcttccacgtagggctcgccacgcaaatcgtcatggtcgtgctgttcctgctgcccctgctggcggccgcccgatggcgaaccgcgttgaacttcggcgtgacctatgccgtactcaccgcgctgggaatgctcgaccccgatgccctgggactgccgtggctgcatgtggtctccgcgctggccgtgggcgtcacgatgatgctgccctgtttcatcaccggcgcgtatgcgttcaccaccacgtccgcgagcgcgttcatctgcgcgatgcggcgtatgcgcgtgcctgaggccgtggtgattccctgtgtggtggtcatccgcttcttcccgaccatcgccgaggattaccggcagattcgcaatgcgatggcgttgcgcggcatcgcctccggcggctgggggctggttcgtcacccggcccaatcgttggaatacattctgattccgctgctgatgaacgccaccaatgtggcacaggacctgtcggtggcggcactgaccaaggggctcgggcgtgagggcgagcacacctcgcgcacgctgatccgtatgaccgtggtcgactggctggtcatgattgtggtcactttgccgctcgcgctcgatatcgcgggggtgatctgatgggtggcaaccaatcgcagccgaatgcaactgccattattgggaccggcaagggtggcccactcgacacgtctgcgggaaccatcgcctcccgtggcatctcctttacctatgaccatgccgcagagccggcattgcgcgacatcacgttgaccgtgcccgcaggcgagtgcatcgtgctgtgcggggcgagcggctgcggcaaaaccagctatacgcgcgttgccaacgggctcatcccctcattcttccatggtgcgttcgccggcaaccagaccacgtgcgggctggatgtggagaccgtgccgatcgaccggctcaccccgctggtcggcagcgtgttccaaaacccgaaaacccagtatttcaacgcgaacgtcaccgacgagctcgccttcccggccgaaaacatagggctgccggccgaggacatcaatcgccgtatcacggccgtggctgagcgctttggcattgggcatctgctgcatcgcagcatcttccacctgtcgggcggccaaaagcagcgcatcgccgtggcggcggccaccatgctggggcccaggctcgtggtattggatgagccgaccagcaatctcgacgcgaacgccatcgcggacatgcgcgccatgatcgagcagatgaaggacgaagggctcaccatcgtaatcgccgaacaccgactcgcatggctcaacggcgtggccgaccggtacgtggtattcgacggcgggcatatcgtgcaggattacgaggccgatgaattcctgtccctctcccccggctgcgtggccgccatgggattgcgggcgttggacctgcaaccgtatcggcaccggattgcggcgctggcttcaagcccggccgcggatgagtgcacttcggcattgctcggcacccataacctcaccatcggatacaaaggcaaggacggcttcacccgcgccatcccggacctgcggttccgtgccggcgaaatcaccgggctcatgggcaacaacggctgcggcaagaccacgctcgtgcgcacgttgaccggactcatcaagcctgtttcgggccgcatcgagctcaacggcgtgcccgcgaaaccgcgcgacctgacccgcgccggattcctggtcatgcaagatgtcaactaccaactgttctccgacagcgtgcgcgaggaactgctcatcggactcgacgagacggatgccggcatcaccgctcaagccaatcaggtcatggccgatcttgaccttgcagcgttcgccgaacggcatccgatgagcctgtccggcgggcagaagcagcgggttgccatcggctcggcattgatgtgcggcaaggacctcatcatccttgacgagcccaccagcggactcgaccgctaccacatggagcaggtcggcgaactgctgcggcaactggcgagccaaggcaaggcgattctcgtggtcacccacgatgaggagctcgccgccggctggtgcgaccgcattgtcaatcttggcgccgacgattccgggaacaacggctcgcatgtcagtaacccagatgccagcagccccagccctaatgcctctaccaatttcgccaccacatccacccatgaaaggaacgcgcaatgaccgccagcaacaccacggattccacggccttcgacatcaccgactggctcggtgaatgggaaagcttcgagcattacattgattcggatgacgccgccatccagcagacctgggaagccgccgagcaggcggtgctcgccaacccgaagacggccccgatggccgcgcgcggcatcaggacgttctggtcgatggcctgctccaccaccagcccggagaacatcatccatatcggctactggcgtgtgaacgagccggccgctgaatccggctccacggacgatgccgcgctcgccatcgaatggttcgccgaggacgacaccagcctcgacacctacgaatacaccatcgaccatgtcatcgagcacggtctcgaaggctcccccaccttcgtgttccacaccaccgatccggccgccgaagacagcccgttccgctggctgcttgccatcaatccgctgccttcgcgcaaggcgttcgccgagggcgggctgctcagccacctgcatttccagtacgccaacgatctgcacacgctcgtcgccacggatgaggccaccggcaccgagaccttgcgcaatccgcgttggtacgccaccatgtgcgccaacgagggaaccgtcgaggaccgttgcgccatcatccgtgcgttgcaccacttgcagtagacctggcaacatacggcagttggcggctccccgctagtgaaactagcatcgcttcagtagccgtgcgagtgcagatactcgtcatcgaagccgaaaaaatggccgatttcgtgcaacacggttttgcggatccgttggcgcagctcggcctgtgttgagcatacgcgttcatgcggccccttgaacagggtgatgacgtccggcatcacgccgctgtagcccgtagttcgcttcgtgacgggtatgccctcatacagtccgagcagctcaccgcacggattgctcattgtggccagttcgcgctcattgggttcgtccgcaacgacgatgccgacattctccagcacccgcgcaaaccgttcaggcaaatcatccaacacctgttcaattgcccgttcaaactcatcgtcactgatgtgcattcgctctccacacgcgaaatgccttggcaccaagtatgttccaaggcgctgaaatctcagactagcaggctcagctgttgcggttgatctcgatgtcggtgacggtgaggttggcctcgttgatcaggttgaagaggatgacttcggccagcggaccgggctgcatgaaggtgtgctgcttggcctcggagacgtagtcgcgactgtcacggtagaaagcggtatcaatgccgcccggatagacggcgaccaccttgacactggtgcccttgtatgcggcctgcagactcttggtatagcccttctcgccccacttggtggcgcagtacacgctttcgttcgcgttgccgcgcgtggcggccgtactcataatctgagcgattttcacattctgttcgccgcaggccttgagggtttccaccgtccacagaatcatgcctttgagtcccttgagacatttgtcgacgtcggcggcctcgtaggcggtgggcaccttgaacgaaggctggccggcgttgttgatgagcaaatcgatgtggccgagcgtggcgatatccgccacggattctttcacgaacacttcgtcggtgatgtcgccgacgtaggcgcggtaggagtcatcgggccactgcgcggtcagttcggcctgacgttcggcattgaagtcgacaccggccaccagccagccgttggcgatgagctggctggcgagctcgtagcccaagcccagcgcgctgccggtgacgatggcgattttcttacctgttgtggttggcatggcagacctctcctactactattcttcggctacgagtttactactattcttcagctacgagttcgagatacgaatcattccagaggtcttcgtcgccgtcgggcatgaggagcacgcgctcggggttgagcgcctcgacggcgccctcatcgtgggtgacgagcacgatggcgccctcatacttggcaatggccttcagaatctcctcacgggaagcggggtcgaggttgttggtgggctcgtcgagcagcagcacgttggctcgcgaggtgaccagcgtggccagagccagacgggtcttctcaccgccggaaagcacgtgagccggtttcatcgcgtcgtcaccggagaacaggaacgagccgagaatcgaacgggcctgcgtgttatcgagctcgggcgccacatgctgcaggttctccaacacggtggcgttcagatccaaggtgtcgtgctcctgcgcgaagtagccgatcttgcagccgtgaccgtattccacggaaccggtgtccggctcctcgatgtgggccagcaggcgcagcgtggtggtcttgccggcaccgttgtagccgaggatcaccacacgcgagcccttgtcgatggccaggttcacgccggcgaacacgatgttggaaccgtaggccttggaaatatccttggccatgatcggagtgcggccgcagggcgcgggctcggggaaacggatgtccgccaccttctcggccttctgcgcctcggaggtgttttccagcagcttttcggcacggcgcatcatgttctgcgccgccacggccttggtggccttggcgtgcagtcgaatgccttgcttcatgagacggtcggccttcttctcggccacttcgcgttcgcggcggcggcgctcctcgtccaccacgcgctggtgcaggtaggccttccagccaagcgaatacatgtcgatctggccgagctgcgcgtccagatgccagaccttgttcaccacttcgtccagcagttcggtggagtgggagatgaccaggaagccgccctcgtacttcttcaagtagccgcgcagccattcgatggaatcggcatccaagtggttggtcggctcgtcgaggatcagggtgtcggcattggagaacaggatgcgcgccagctcgatgcggcggcgctggccaccggagagcgtgccgagctgctgctccatgacctcctgcggcaggccgagcgaggcggccatggaaatcgcctcggactgggccgcgtagccgccggccttgtcgaagtcctgcatggccttgtcgtaccgggtcatggccttgctcatcacgtccggatccgggtcggtcatatccttttcggccttgcggatgcggttgatgatggtggcgatgtcgcgcgcgctcatcatgcggtcgagcgcggtctgtgtgggatcggaggcatgcgtgtcctgcggcaggtagccaagcttgccggagacgcgcaccttgccggcggtgggcagcatgtcgccggtgatcacgcgggtcagcgtggtcttgccggcgccgttgcggcccaccagaccgatcttgtctcccttggccacatggaagttggtggggtgaagcagcgtgcgcgcgccgatctgaatttcaagtccctgcacctcaatagccatgaataacctacttgcctgttacgaatactgtctcttaccaaagtccgactgtccatcatagcgaacaccatgccgaccgggctcagccgacgctcatgcgtccatacgcagccgcgcaactgatcggcaaggtgaagaatgcgacgcccggtatggtgatcgcgaccatggcgcacggtatcgaagctgccatcgaagccgctgtgagcaccgaaaccgacgccaccgacatcatggacgaaacccactaacgtacagacagcgatgcccccgccgacaacttctgtcagcgggggcatcgctatgcgttgaacgttacagttcgcgcaactgggcggcgatctggatggactcgacgctggcctcggccttgttgcgcgtctcctgccattcggtggcgggcacggagtcgagcacaatgccggcaccggcctgcacgctcgcctcatggtcgcgcaggaacgcggtgcggatggcgatggccatgtccatgttgccggagaaatcgaagtagccgacggtgccgccgtagatgccgcggtcggccggttccaactcgtcgatgatttcgactgcgcgcggcttaggcgcgccagacagcgtgccggccgggaacgcggacttgaacacatcgaatgcggtcagcgaggggtcgaccttgccggtgaccgtcgagcagatgtgcatgatgtggctgaaacgcttgatgtccatgagctgcacgacttccacggactgcggcacgcacaccttactcaggtcgttgcgagacaggtcgacgagcatgatgtgctcgctgcattccttcggatcggcaagcagctccttggcgaatttctcgtcttcctcaggggtggcgccgcgagggcgggatccagcaatcgggaaggtcatcgcgtggccgttgtccaccttgatgagggtttccgggctggagccgatcacgttgaagtcgcggccctgagcgtcggtcaacgccatgaaatacatgtacgggctcgggttcagcgtgcgcaacacacggtacacgtcgaacgggtcagcaggcgaatcgatgtcgaggcgctgggagatgaccacctggaacacgtcgccgtcgacgatgtgctgcttggcgcgttcgacggcctgctcgtagtggctcttctcggtgcggaagcgcagctcgggttgggcgaccgtttcgtccaggatgttgacgcgggactcgtccgaagccggggtggcggcatcgcgctgcatctggtcgagtcgagcgacggcctcgttgtaggcagcgtcggcgcgagtggatttatcatccacattcaccgcattggcgatgagccataccgaaccggatacgtggtcgaccacggcgatatcggtggccagggcaagcacggtctcaggctggccggtctcgtccggagcttcggcgcgcagggtcggttcccagtggcggatggcatcccagccgaccgtgccgaccagaccgctggtcaggttcggcaggccttccacatgaggggccttcagagtcttcaacgtggcgtgagcgacttcgactacgtcaccggtgacgggcacgccgaccgggaccttgcccagccagtcggcctgaccgttgttggagcgcagctgggccatcgagttgacgccgatgaagctgtaacggctccacgtgccgccgtattccgccgattcgaggatgaaggtgccggatcggccgccggcgagacgctcgtagaagccgaccggggtgagcgagtcggcgagcagacggcgcacaatcggaatcacacggtagccggcgtcggccagttcgtggaactgttcgcgactgggccaggtggcgccccacttcaggtgtttgacgctgcattcgctcatattcgctcctttgcttacaactcgatatcttgtttcatagtacgcggtcgctcggcttccctcagtcaggaaagcccgttctactgctcggccgggcgatggccttcgaccacgggcagggggccgccttcgaggaagcagctgcgcttgccggtgtggcaggcggcaccgacttggtcgacttcgacgagcagtgcgtcgccgtcgcaatccagggacacgcccttgacgtattgcacatggccggaggtatcacccttgcgccagtattcctgacgggaccgggaccagaaggtcacgcggccggtggtcagcgtgcggcgtaatgcctcgtcgttcatgtagccgaccatcagcacctcgtgtgtgtcgtactgctggatgacggcggcgaccagacccttggcatcacgcttcaggcgtgcggcaatacggggatcgagttcagtggaattgtcgtatgtagtgtctgtcatacctatcttctttttgtggaccaccctcagtcagcttcgctgacagctcccggattatgtgcgacgtgcgcatagcgcattgccacgaacaattcactggattgttcgcccagcgggagcaaggtgtattcgtttagcgaacggtgtagccgtgcttcttgagttccgccttgacatcggcgatagtcaggatgccgtaatggaacacggatgcagccagcaccgcgtcggcacctgcttcgatggcgggcgggaagtcctcgaccttgccggcaccgccggaggcgatgatcggaatcttgacttccttgcgcacggcgcgaatcatctcgaggtcaaagccttccttggtgccgtcggcgtccatcgagttaagcagaatctcgccggcgccaagctgctcggcgcgcttgacccaccagatggcatcaataccggtggatttgcggccgcccatcgtggtgacctcaaaaccggactgcgtatgctgctcacccttttcgcggcgggcatccacggagagcaccagcacctggttgccgaaacgatcggccacacggctgataagcgacgggtcgttgatggccgccgtgttgacaccgaccttgtctgcaccgcagcgcagcagcgagtcgacgtcctcgggcgtgcgtacgccgccgcccacagtcattgggatgaacacctgttcggcggtgcaggagaccacgtcaatcatcgtgttgcggtgggagctggatgcggtcacatccaggaaggtgatctcgtcggctccctgacggtagtattcggccgccagctccaccgggtcacccgcgtccttgaggttctcgaaatgcacacccttcaccacgcgaccggcgtcaacgtccaggcacgggatgactcgtaccgccaacgacatgcttcactcccctgttcggctttgcattacagtccttcagactacctaccgcccgttacatgcgccgcacctgtttctggaatatgagaatcatcatattgagcaccgacatggcagccgctcggcgtgagagaatggctcgtggaagttgtccgccgaatcaaggagattggcatggctgtcgaaaacagcaaggtactgatcatcgtcaacaactggggtatcgaggagaccgagctgacgcgcccgctgcgcgatctcaaggccgccggcgtcaaggtgacgcttgccgccactaccttggacccgtgtgagacggtgcagcacgaccgctacgaaggtgaaacgctgaccccggacgcgcgcctgtccgacgtgcaggctgccgactacgacctgctggtggtgcccggcggcacctgcaatgtggatcgtatccgcgtcaatgaggatgcgatcacgctggcgcaggagttcgcgcacgaaggcaagccgatcgccgcgatctgccatggcgcgtggctgctggtcaacgcgggtctggtggctggcaagaccgccgcgccctgccgctatatcgccgctgatatcgagaacgcgggcggccattacgtcgacgagcagctgcacgtggacgacgccaacggcttcaagctcatcacgtcccgcaagcccgacgatctggactacttcgtgggcgcaatcaaggatgcgctgaagtagctaccgctccttggcagcaagctggccgcaggcgccgtcaatatcctgaccgcgggtgtcacgcagtgtggcggtgatgcccgcgcggtgcaggatctccaggaaccgctgttcgtcttccggcttggaggcggtccacttcgagtcctcgatggggttgagcggaatcgggttgacgtgggcccagttgtcgccgtaatggttaagcctcttggccagcaactgcgcatgctcggcctggtcgttgatgccgcgcatcaacgcgtattcgatactgacgcggcgcttggaggccagccaataatcgtgcgcggcatccaacacctgcttggtattgaaacgcttgttcatcggcaccagctcgtcacgcagttcgtcgctgggggcatgcagggaaacggccagacgcacgggaatgccttcggcagtgagcttcttgatgccggggaccacgcccaccgtggatacggtgatgttgcgcgcggaaatgccgaagccttcgggaggcatggcggaaatctgtcgtacggcggacagcacggagttgtagttgcccatcggctcgcccatgcccatgaacacgatgttgctcaggcggccctctcccccggccacttcgccgtcgcgcatcattttggcggccacacgcacctgttcgattatttcaccggtggacatgttacgggtcaggccaagcttgccggtggcgcagaacgggcagcccatgccgcagccgacctgcgaggagatgcacagcgtggtgcgggtcgggtatcgcataagcaccgattcgatgagggagccgtcgaacagcttccacaaggtcttgatggtggtgccttcgtccgccacttggcgggtcacctcggtgatgagctgcgggaaaaacgcggcggcggcctcgctgcgcttggctgccggaaaatcagtgaattcggcggcattcacatcgaaatggccaaagtaatggttggcgagctgcttgactcggaacttcggcaatccgagttcggccgctttctcgacgcgctgctcgggcgtcatatccacaaagtgcagcggcggcttaccacggcgggcatggtccttggatagcacgtcacggaaggcacctgatgtgccgccgggagtaatgccggtttccggagtgtcaggatgctgtgtggtcatgatgggttcgcttcgctctcaatatcagaaaatagtcaaacatgcaatagaaatatcagaatccaccatacggcgtgccgcatacgaatcagatggcccatgtcttagcccatagcgaacgcatattgaacgatgatttccccatatatgacatgtggcaccgtgcgatatacacacgatgccacattgttcgtgcacgaggcatgcgaatcacagtccggtgatccacagcaaggcgcaggtgaacggtgcactcatcaaaatggaatccacacgatccatcacaccgccgtgccccttgagcagatggcccatgtctttgataccgatatcgcgcttgagcatggaagcacacaaatcaccgaacgtgcccacggcaccgatgagaatacccgccacgatcggcacccaccaacgagtggcccatttcgaggcatcatacgtgcatgcgaatacggcaaatgcgccagccatggcgaagagcatcgagccgacaaggccctcaacggacttcttcggcgagatgcgcgggctgagcttgtgtttgccgagccaggcaccagcaaacaaaccgcccgtatcggatagggcgggtaggaacaccagcatgatggcgtgtgcaatcggatgcccattaaaagtcagtgagatgatgacgcagctggccaacaacggaatatacaacacggtaagcacggacacagccacatggctgagccgggaatgatgctgttccccgccctcatgattaaacgaggattcgaggcgcgcgctggcatccgtgttggacagtttgccggcaaccgccagagataggcggttgccgacgctgatttttgcgctggccgcgatggcgaccagaataatcgacacgatgatactcagcgacatcgtgatgagatggtacggggaatagtaggtggcgatgagggtgaaggacgagcacagccacagcataaacaccgggaggtgcaggcccacggtggcgaagtccaccctgagctcccacagcgccagaatcatgaacatgactaccagcagcacgaagaggtcgacgctgagcagcaggcacgcgacaataagggtgaccagtgccgcgcctgtggcgatggcctgcggcatgttgcggccggtcttcttgttgatctggtcgagcgtctcctcggcctcttcatggagttgttcgttgcgttccataattctccggacctggtctgaatcagacctccatgatctccttctgcttggtctccagcagagtatcgatctcgtcggtaacggacttggtgaccttgtcaagatccttcagcaggcgatcgccttcgtcctcacccatctcgccgtccttgacggccttgtcgatggtttccttggtcttacggcgaatgttgcgcacggcgaccttgccatcctcggccttgcccttggcgagcttgacgtattccttacgacgatcctcggtgagttccggcatggtcagacggatgacgttgccatcacggttcgggctgatgccgaggtcggagttgcgcagggccttttcgacggcaccggcctgggaagcgtcaaacggggtgacggacagagtgcgcggttcgggaacgccgatggaggcgacggccttaatcggggtgggggcaccatagtagtccacggtgatgccgttgagcagggccgggtttgcgcgaccggtacggatgccggagaagttttccttggtgttttccacggtcttggccatctgttccttggcctggtcgataagagacatattcactccttgtgtgttggtgttcgtcagtgttgttcgtctatgaacgcttgattcgattgtgggcgtttgcggcttactcggccacgcgcgattcggcggtggagaccagcgtgccgatttcatcgccgacgagggcgcgggtcacgttgcccggctcttcgaggccgaagacgcggatgcgcttcttgttgtcgcgggccatggacagtgcggaggcgtccatgacggccagattgtccacgagggcgcgattgtagctcagggtttcaaaacgcttggcgttctcgtccttgcgcgggtcggcggtgtagacgccgtcgacgccgttcttacccataagtacctcgtcgcagtggatttcgagggaacgctggatggaaaccgtgtcggtggagaagtacggcatgccggcaccggcgccgaaaatcaccacgcgacccttttcaaggtgacggatggccttgagcggaatatacggctcggcgacctgtcccatggtgatggcggtctgcacgcgggtggcctgcccctcctgctccagaaagtcctgtagagcgaggcagttcatcaccgtgccgagcatacccatgtagtcgccacgggaacgatcgataccggcctgctgcagttcggcaccgcggaagaagttgccgccgccgaccacgatggccacctgcacaccctgttgtacggccggaacgatctcctcggcaatgcgacgaatcacctgggtatcgatgccgaccttgccaccaccgaatgcttcgccggaaagcttgagcagaactctgcgcggattgtcgctatcagtcatattgtgcctttctcaaaaccgaaagtgcgaaattatccgtagacaagcgtatcggtttacgacgacaccccctagcaacgacacccttggaatagcgaaacgccatccgattattgaataaccggatggcgtttcgttgaaattacgctaagcgcgtggagtaagccttaggctcactcctcttcgcccttgccgacctcgacacgagcgaatgcggtggcgttgccaccgacttccttgaacaggtcgccgacggtcttggacgggtccttgacgaacggctgctcaagcagcacgacttccttgaagaaagcgttgagacggccttcgacgatcttcggaacgatcttctccggcttgccctcggccagggacttctcggtggccacgcgacgctcggactcgaccacatcggccggaacgtcctcgcgggtcagccacttggcgcccatggcggagatctgcagagcagcttcgtgagccacggcggcgccggccttgtcggtggcgatcatggcgacgatgctcggcggcatctcggcggacttcttgtgagcgtagacttcgacgtgctcgccggagatcttggcgaactggccgaccttgacgtgctcaccgaacagggcggcggcctcttcgacagccagcttgacggtggtgtcgccagccttggcctcgagcagctcgtcagcagagttggcgtcggcgtccacggcgtagccgagaacttcctcggtgaactcgacgaacttcggggtcttggccacgaagtcggtctcggagttcagctcgacggcgtagccggtctcgccattggcggtctcgacgaccttggaggcgatggtgccttcctgagccttgcggccttcacgcttgccggctgcggcgatacccttggcgcggatgatttccttggcgcgggcgacgtcgccttcggcttcggtcagagccttcttgacgtcgagcatgccggcgccggtgtcttcacgaacctgcttgatcagtgcggcggtaattgctgccattgattattctccttgagaaattttgcttacccatgaacgatgggaagcgcttattcaggcacttcccatcgtagagcatcactcggccttgggggcctcggcggtttcgccctcggcggcagccggagcggcggcttcagcggaagcctcggcaggagcctcgttggtcaggagttccttctcccaagcggccatcggctgctcggcggcttcgccctcggccttgttggcgccggagcgctccagcagaccttcggcgacggcgtcagccatcaggctggtcagcagttcgatgccgcggatggcgtcatcgttggccgggatcgggtactcaacggtgtccgggtcggcgttggtgtcgacgatggcgacaaccgggatacccagcttgtgagcttcctcaacagccagggcttccttggtgatgtcgacgacgaacatcgcggacggggtgcggttcatgttgcggataccgcccagctgcttgttgagcttgtccttctcgcgctcgagcaggaggagctccttcttggtcaggccggaaccgtgcacgtcggtgaagtccatttcctcaagttccttgaggcggttgacgcgcttggagacggtctggaagttggtcagcatgccgccgagccaacgctcggagacgtagggcatgttcacgcgggtggcctggttggcgatagcttcctgagcctgcttcttggtgccgacgaagagcacggtgccgttgtgggccacggtggtcttgatgaagtcgtacgccttgtcgatcatgtcgagcgacttgaacaggttgatgatgtggatgccgttgcgctgggtgaggatgaactgcttcatcttcgggttccaacgacgggtctggtggccgaagtgcaggccagccttcagcatatcgctcatagtgatctgagccatggtattactacctttcattgtcggttcttgcctggccatgcgcacctgcgtgcagctgctcccccggtttcacgagttgtgcagccgaccgacacaagccgtcgcgagcatgacgcgaatttgttgtgtgccggttgacaatattgggtggctctggacgccagcgactgcgtccgttgccgggtggcacacgagtttcgagaatagcacggagccggtactaaaaaaacaggctcccctctctgaggggagctgtcgccgtaagcgactgaggggagttacgggcggtaccggcagaaccaccctcagtctcactacgttcgacggctcccgccagcgggagccgagtatggactacttcgcctgacgattgcgcatgtagcgcagggcttcgcggcgttcttccttttccaggcgatccaaatacacgtggccgtcgaggtggtcgcattcgtgctgaagcatacggcccatcagcccggagccctcgagcacgacctcgttgccgtccaagtcgatgccacgcacgcgagcgtagtcggcacgacgggtcttataccacaagccgggcacggacagacaaccttcatcgccatactgctcgccggacttctcctcgagtacggggttcagaacgtagccgactttgccgtcgatgttgtaggagaaggccctcaggctcacgccgatctggttggcggacaggcccgctcggcccggatcgtccacggtttccaacaggtcgtcaaccaggcggcgcacggccggggtgatttccttgatctcatcgcagggggtgcgcaggactgggtcgggcacgaccctgatctcacggatggccacttctcgttactcctcattcttctcgtcagccggctggtccggcttgctgccggtgtcagcggcattgtcggcattgtcggcattgtcagcggaatcgccggtctcgccctcttcgggttcggccttcgacttcttgatcttctccgacacgctagcaatcgaatcagacacgctggttttcatctgttccgaggcctgtttgacctgttcggacgcctgcttgaccgattcggaggatttcttgacggtctccagcgtgctgtcgatgatcttggcagtggcgggcagcggcttgttggatggcttgggcgcgtacagatcctcctcgatgacggtggcgtagcgctgcaataccttgggacgcaccactttcatgctcggggtgagtgtgccgtgctcctgactgaattcctcatccagcaccgcgaatttgcgcacggactcagcgcgggagacattggcgttggcctggtcgatgtactgctggataaaggcgcgcaccgcgtcgttgtcgctggcctcggcgagtgtcatgtcggcattgaggccctgaccttccagccaggaatgcagcatttcggggtcgagctcgataagtgcggacacgaacggcttgccgtcgccgactactactgcatgagccacgatcgggcaggtgtcgatgacatcctccatcggggcggggctgatgttcttgccgccggcggtgatgatgatgtccttcttgcgtccggtaatgaaggtgaagccgcggtcgtcgatacgacccagatcgccggttttgatccagccgtcggcagtcatcgtctgtgcggtgagttcgggctgcttgtagtagccaaggaacacgttcgggccggtcagctcaatttcatcgtcttcgccaagacgcacgcccatgccaggcccaggcttgccgaccgaaccgatctcgttgtcgtcctcccaattgacgagcatcggagcggcggtttcggtcatgccataaccctggatgaaggtgatgtcattcatgccgttgaaaaagtgggccaaatccacgttgagcggcgcaccaccgcaggccagccatttgaggttcggtccgagagcggaacgaatggatttgcccaccgtggccatgtagaacgaatggcgcatgcgctcgatgaacgaatggccgcgaccggcctgctcatccttgctccacttgacgaagtgcttgaccgactgggcgaagatatgcccctggatgccggcaccagccttctgcgaggccgcgttatacaccttctcgaacacacgtggcacgcccagcaggtaggtgggcttgaagctgcggatatcggcgagcagtcgcttggcgtcgggaatgtatccgaccacgccgcagccaccgatgcacacgtactggatgtagcgggcgaagcagtgcgccagcggcaggaacagcagcagacggttgtcgtcgtacagcatgccacgcagaatctcgtagccgttaagcacgatgtgcgtgtaattgcggttggagagcatcgcgcccttgggcttgccggtggaaccggaggtgtagaccacggtgagcagatcatcggctttgatacgagcgatagccgcatccaacgtctcatcggatacgccatgcccgaagtcaacgacagcgtcaaggccatcggccttgaaattgaacacgtatttcatgcccggatgattgacacggatctgctcaagcgtctgtgcgcgctggaagtcgccggcaaaggcgatggcgggatcgacttcctcgacgatgcccgcggtctgacgggcggaatcggtctcatagacgggcacaaccacagcgccgattgccgcgcaagcgaaatcagccacaccccactcatagcaggtaggcgagtaaatcagcaccatggtgccggctttgacgccaagtcccaacaggcccttggccacctcgcgtacgcgggacagcatttcagtagctgtggcgctgcgccattggtgggtgttgtcatcctgccattccgcgatgatgtcatccggcgtgcgagctgctcgtttggacagcagcgagtagacggtgtcgtcatcggtggtgacatatctgggttcttctacatgttcacgcatggtcactactataggcgaaccagcctatgacacggcagaaccgtcttccgctaccagcgtaggaatcggtgtgcgggcggggccgtctggtcagcccaaatcggcatagatgcacatccatcgagaaccgatgtacttcagtttgaggttgactcgcagattttcctggccgatggtcatgaataccgccatttccagcgtgtccttgccggtgatcatgccgtcgatcaatgtggggacagtgggcagatagcagaatttcgctttgagctccggatgagtgaccatgtggatgccgagcaggtattgcatggtttgcagccggtccaggcatggttttgtcatggctctgttgagatgtgcgacgctgagtttgccacgtatcgcgtccgccgatgtgcaggcgatgcggcatgcagccatggccatggaatgacattccttcgcattcagcccgcctatgaatgtgggttggatgtgataccgcaccgggcgatccgacagctccacaacgatgaatccgtcataactcggcaacggcccgtactgatatgtgccgtggaaaaatcccgaatactccatgatgacccccttcaagcccccttgcaactcaccatcatcggcgagcgtctgtactacaacatcacgaaaggcgcgccaagtcaaactacttgagcgcgccttcgggcaagttaagcctcctgcatggagggcaaacccccattttcagggggcaatcgggattatcgtgcggaatacgggttgaccaccatgccgcaacgctggaagttcttcacgtcgacgtagccggtggaggccatcgcgcgcttgagggcgccgatgaagttggtcttgccgtccgcctggtggctcggtccgaacagcacctgttcgagcgggccgaccgtgccgaccgtggtgcggtagccacgcggcagcgtctggtggcgggcttcggaaccccagtgggtgcccttgccgggggcctcggtggcgcgggccagcggcgcgccgagcataaccgcgtcggcgccgagggccagggccttgacgaagctgccggagtcgcccatgccgccgtcggcgatgacctgcacgtagcggccgccggattcgtccatgtagtcgcggcgggcctcggccacgtcggcgatggcggtggccatcggggcctgcacgccgatggtctggcgggtggcggagaccgcgccgccgccgaagccgacgagcacgccggccgcgccggtgcgcatcaggtgcagggcagcggtgtagttggatgcgccgccgacgatgacgggcacgtcaaggtcgtagatgaacttcttgaggttcagtggttcctggccggaggagacgtgctcggcggagaccacagtgccgcggatcacgaacaggtccacgcccgcgtccaccacggtggagtagaactgctgggtgcgctgcggggagagcgcgccggccacggtgacaccggcggcgcgaatctcgtgcagacgttgcgtgatgagctccggcttgaccggctcggcatagatctgctggatacgctcggtggcctgatcggccggcagtccggcgatttcgtccaacagcggggtcggatcctcgtaacgggtccacagaccttccagatcgagcacgccgagcgcacccatcttgcccatggcgatggcggtggccgggctggtcaccgaatccatgggggcgccaatcaccggcacatcgaactcataggcgtcgatctgccaagaggtggagacgtcctcggggtcgcgggtgcgacgggaggggacgattgccacatcgtcgagtgcgtagccgagacggccttttttgcccaaaccgatttcaatttcctgagacatggtttccagcctattgcccgggtgggacgccaacaaggccgtttcccacggaccggacgattgcttcaagtcgttacaaacatgcgctatgactaaatcatcttcacaccatctatcaggaggaagcatggccaaaatcaaggtcgaaggcactgtcgtcgaactcgacggcgacgagatgacccgcgtgatctggaaggacatcaaggatcgtctgatcctgccgtacctcgacgtgaacctcgactactacgatctgggcatcgagcaccgcgacgagaccgatgaccaggtgaccatcgacgccgcccacgccatccagaagcaccatgtcggtgtcaagtgcgccaccatcacccccgatgaggcccgagtcaaggaattcggtctcaagaagatgtggaagtcccccaacggcaccatccgcaacatcctgggcggcacgatcttccgcgagccgattgtgatgagcaacgtgcctcgtctggtgcccggctggaccaagccgatcgtcgtagcccgtcacgcattcggcgaccagtacaaggccaccgatttcaaggttccgggagccggccagctgaccgtcaccttcactccggacgatggctccgagccgattcagcacgtggtctacaactacggcgaagacggcggcgtggcccaggtgcagtacaacgtcaacgattcgatccgcggtttcgctcgcgcctgcttcaactacggcctgatgcgtcattacccggtgtacttgtccaccaagaacacgattttgaaggcctacgacggccagttcaaggacatctttgccgaggtgttcgagaccgaatacaaggacaagtacgccgaggccggcctgacttacgagcaccgcctgatcgacgacatggtggccagctccctgaagtggcacggcggttacatctgggcctgcaagaactacgatggcgatgtgcagtccgactccgtggcccagggcttcggttcgctgggcctcatgacctccgtgctcatgaccccggacggccagaccgtcgaggccgaagcggcgcacggcaccgtgacccgtcactaccgccgctggcagaagggcgagaagacctccaccaacccgatcgcctccatcttcgcgtggaccggcggccttaagcaccgcgccgatctggacggcacgcccgaagtccgtcacttcgccaagacgctggagaaggtcatcgtcgacaccgttgaaggcggtcagatgaccaaggatctggccatgctcatcggcccggacgaaccgtggctcgacaccgacggcttcatgaacgcgctggacgagaacctggccaaggctctggccgagtaaatcatcgaacacatcgtgcggacctacatgggccatgtcatgtcgcaaactgtcatgattgtcgtgcttcatctggaatgttcctcagcacgataatcatgacagttgttcgatgcacgcacgtaatacctctaattgttcccggatatgtggcgatttgtccactggtccgggactttttcgtatacggcctactagaatcgtgattcagtttgttttcacgcccgcttgaggaggtttcgccgcttatggtgttcgcacgccgctcaaccaccctgctcgccgccattatcgcatcctgcgcgatggtgctgtcactgaccgcgtgcacctcagacaataagaccgttgtagatggtcagaccacggtgacgtccaattctgccggcggcgtggccgtgttcacaccttcggacggcatcacgctgaaccagcagatgccactgaacaagtgggcgaagctggtgcctgacctgaccaaggctctggtcgacgccggtttcaagaaaggcgatatcaatcatacgacgtccgactcgttggataagcaaagccgcgccatccaagactttgtggtcgatcatctttcgaataacaccacggacgattccggcattgccatcgcgcccgacaacatgacattgctcgtggctccagtagtcgaggccgacgcttccactcgccaatacggcgattacgtgagccagaacctgagcaccaacgatgtcacggatgagggagctacttctgacggtgaatcttccgaagacgactcgtccaaagacgactcgtccaacactgagagcgacagcactgcatcggacgagcaggcgcaggccgtggaccggctggtctcatcgctcaagctggccaaggaatccggcatgcatgtggtattgctcggcaacagtatcgagggatataagccggacgccttcgtcaagttctcggacgcccagaccatcggcaagctacaggcggaaaagatggtgtccaaactcaagttggataaggccagtaaagacaaccccaaatacattgaggtgctgctgccatacaccgccatggacgaaaaaggcaacgccaacgattccacgttcgcccaagaggcgttccgtggtatctggcaggtactgggctcctactatcagaagggcgttgtggaaagcccttcaggcaccttggacggcaaatccacggaaaacgattggcaagccgtggcctacgatgccgctaaggaaggctccactgcgaaagtgcttgacaagcgtctggcaaaaaccgacggacagtccacactcacccgtattgacggcatcatcacgatgaacgactacatcgcctccgaggtcgtcaaggaattggacgatctgggatacaccggctctgccgccgatatcaatccgcagatcaccatctcgggcattgtcggcaatatcaccggcaagaaggatctcagccgcgacgccgtgccggacccgatcaaatcccctgaaaacgacaacgcaaacgactcatccagttccgatgacgatgcggacaaggacacctccgcttccgacaaggaccgtgactcgcagtggcctctagtaaccggatacggcgcgtatgtctcgaacatcccatccatcgtcaatggcaagcaatggatgaccggcatggaagacagacagaccatcgccacggatatcgctcaggcctgcgccaagctcaacaaggacgaagcgctgaattccatgccttcaatcaggaactccgaggtaggcggcgtgaagaagatcccgaccatcaacgaaccgttgctggctgtcagcgccggcaatctcaagtccgcgttgatcgaccccggatatatttccttggccgatgccggtctgtgattcatactcgtcacgccgctagccgcctgcgatgtctcttccgcacggccctgttccggccgacaatcaccgttaaatcatgacggtttcagtacgatttttcgactccccgcatattgctgtgggtcaagatagtcggccgttcctcgcttgaggccccaatgcaggcaacggtcttcgcaatggtccgagctgccttcaacgatgcctacgggctgtctgcgggagatcgtatcccccactgaaagctcggtaacggccggttcgaatgtcgacgtgacacctccacgatgccgtacactcaccacatctttgccagctactttgccagcaaaactcacggtccctgcctgtggtgacagaattacggtaccttgctccgcaacaagatccactccgcgatgacctggtgcccacgggttgatcggccgctcgaactgttgttcgacctgtggatcgtcgaccggccagtcgaaccgggattcgcactgattgccattgcgccacgccaaatcagacatatcggtgaaatcctccaccgtgtatgccgcatctccggtcaccgcagtatccgcatgcgcaacatgctgaggcgtggattccagccctactcccaaggcaagcagcaggccgataacggcggtcaacgcgattatggcatccacacgccgttgccgttcctgagcccgctgacgcgcctgctgacgccgcctgctggcacgtcgggcttcgtcgcgacgccaatcaaacaacagtggtgcattcatgagattcctccccatagtgtgagtgtgatgcgattccggcttttttgccggtgatacccaccttgaggggtccgaaacaggatgtccagccagaacgacctatgtggttctagcttccgaagttatccacaatgaaatttcgcgtgacagtatcgccgcatcgtcatgttgttcgaccttcagccgtggccgatccatgtcacaaccgctgccatgcagtgacagcggaacatcagaactcttgtgattgttcccactgggttcgcatactcagacggttgttccgtttcaccgattccagtatttgccaagcagacaccagctcctcccgggggtttcatcagtattcgccgttccatagccagctcctctaccgttagtcgctagtgtatatccgtgttcggtttttggctgtatgagtgggtattcgatgagtccgattctgcggaattcagcgcgacatgccctacacgcatgtaatttgctttttcgtggcaggcatgtaagatatgtgacttgtgcgcgagagaaatctcaaacacagcagacattcctgcgtagctcagttggcagagcatccgactgttaatcggacggtcactggttcaagcccagtcgcaggagctcacctgaacgggtaactccggtcgggatgaaaattgaatattcctgcgtagctcagttggcagagcatccgactgttaatcggacggtcactggttcaagcccagtcgcaggagctcacctgaacgggtaactccggtcgggatgaaaattgaatattcctgcgtagctcagttggcagagcatccgactgttaatcggacggtcactggttcaagcccagtcgcaggagccatcgaaagcctcggttctccgaggcttttttattttcatcgtattggtggccagacacgacaccccatcatcaaccgggaaatccatggcgaagacctcaccactactcacatcaggcagacaggtcactgtcaattcaccgatgagaggcacggtattcccagtatcagtttgggaataccgcgcaaatcttacatcgagaccttggtcaggggcatggcggagtcaatcgggaagtcgggggcgctgggggccacgccggcttcgaccaggttcacgccgagcatggcgaccatggcaccgttgtcggtgcagagcttgatttgcgggatacggacgtcgacgccgtagttctcgccgaattcgagcagtttggcgcgcagctgcgagttggcggagaagccgccgcccacgatcagcgtgttggaatcgtactgccggcagccgcgcatggccttacgggccagcacggtggccacggaatcggccagggatgcgcacacgtcgtccaccggaatctcatggccggcggcctgctcgctttccacccaacgggccacggcggtcttgacaccggagaaactgaaatcatacgggtgcgcggcaccggccttgccttgggtcagacccatcggcaccttgatggcgtgcgggtcgccgttctgaccatggcggtcgatgtgcgggccgcccggatacgggaagccgagcaggcgggcgaccttgtcgaagcactcccccgccgcgtcatccagcgtggtgcccaccacatcgattttgcgcggcatgtcttccacgtgcagcagcgaggtgtggccgccggagacgatcagagccagcgtgtccttggggaacgggccgaactgcagctgagtgacggcgatgtgcccgatcacatggttgatgccgtaaatcggcttgttcgcagcccaggccagcgccttggcgccggacacgcccacggccaggcaaccggccagtccgggaccggcggacacggcgatggcgtccacatccgccaacgtcatgttcgcgtcgacgagcgccttggacacgcatggcacgaaggcctcggcgtgcgcgcgggaggcgatttcggggatcacgccgccgtatcgcgcgtgttcctccatggatgaggccacgacgttggagagcagttcgcggccgcgtacgatggcggctgcggtttcgtcgcaggtggattcaatacccagtacaaccggttcgctcatcgtgcttctccgttcttctccgtttgcttgctggtgatgtcttcaatgtccgccgatgccgtctgcggggcggcaaagcccacgaccctaggtttcaggtccaagctcatggtgtatgcgtcgatgccttcgggctggtagtagcgtttgcgcaatcccatgcgttcgaatccgaaccgctgatacagggccagcgcagggtcgttatccacacgcacttcgagcagcatgcgcgaggcgccctgacgtttcgcctcgtcgaccagtacctgaagcaacgcagcggcgatgccttgccgctggtatgccttgcccacgccgatggtcatgagctcggcgtcctcgccgtcgtaccagaagccggcgtagccgcggacaacagcctgttccgcctctcccagcacatccagcagatacgtgcgggccggtgcgtccagttcctctcgcaccatgttcgcattccatgcgccgcggccgaacagttcgccttccaactgtgcgatggaacgaaccgcaagatcacgacttacggcagtgatgtcaacaatcatcggaccacaacccacttcacgccttatcggcaccggcatggccgagcacgtgcttcagtgggttcggtacttcggcgtccggccggcgcaggtacaacggttcgatcggcacgacctggtcgccgcgcagttcgcggctcaacgcggtggtcgcaaagacggcgagcccggctttcccggcatccaataccgatccgtccaccacggagcccagcgcacgcagtccctgccagacggatgcgtatttggccgcgccgtggccggtcacatccaccacatagctgacgccgtcgcgttcgccgtgttccgcgagcgccgcgttcacccgttcgacgatatgctccgggtagtcgatatccatctcgatccagcgtcgttcggcggcgtcctcgtccggcaggctgatgctgccgtggttgagcgagaagtacagctgcttgcggcgcgcatcgttgacgcacagcgtgacgtggcggtcgagttcgtgttccttggcctcggcgtccgggacgtcaccatccgattggcgcgaactcaagcgcggcacgtcggccaggaaatcgatgccgtcgaacatggcgctgtcacccagcacgaagttcatcatctcgccttgcgggtcgagtacgttctgtccgacgagcttggccccggtggcgaaggccaacgccttggcggccacgatgccggcgcgcaggccggtgaatggcgccgggccgatgcccacgacgatctcctcgatatcggcaggagtcaggccggcctcctcgaccgcgcgcgcgatattgacctgcagtttctccacatgggtgcgcgaatcggtctctacaatgggctcgcgccccacaatgccgaccgtcgagccgaatgaggtgtcaatcaccaacgtgcaacccatgaatcctcctagtcgtaaagcctctagagagtgtacatcgaggagtctatgggcgcatggcttattgcaggtcgaacgcggcccatcgcttgccgactgggacgaatgcgacggtacgagtgccgttgctggtgagttcgccgtctgatccagcggatgcgacatcggaggaatcgagaggtcgatcgatatggatttcaagtcgttctggtgccaaggcggtggccatttgttcgccccactccataagcaccaccgtgttctcgccggggtcttcaagttcttcgtccaatcccagcgattccagctcgtccaacaaacgcccgatggcgtcctgccccggcgcataggctgagccgcccagacggtaggcatccacatgcaccagatgagccggagtgccgtcggcgaaatgcccgtcaagttcgcgggcaatggtgaatgtaggagacacgatgggttcggtaatgtccagccccgcgccgaagccctgggcgaatgtggttttgccggcaccaagagggcctgagagcagcaatacatcgccgccgtgtaccattccggccacgcggcggccgagctcctgcatggcctcgctggtgggagccgcaatagtgtgttcgctcataaatacccctttatcgacttttaccgacctttatgactgatgtcttcaatgcagcgttccagcgcatataccgggtcgccgccgttcgttttgctttgctcatccgcccaggcgagcatacggatgcaatgcgcgagtcctgccgaagtccagccgccaagttggcgcatcgcattcttcagcacccacggattggttttcgcttcggcctgtgaaatcgtgccggcccggaccgccgaggctttggcaatggtacggagcttcatggccaacgcgccgatcagcgcgatgggatcggtcccttgttccacagctgcacgcatcatgacgatggcttctgcggttttgccttccacggccttgtctgccacggcaaaaccggtgacctgcggattggcggtcaaatactggttgacacggtcgagccccatcggattatcgtcaaagtcgaaacacaattgctcgcacatggcggcgagttcgccggttttgccgccgagcacggataccagctgctgcgcggccatcggttcgactctacgaccgcgtttctcgaattctccgaatacgaaattgagttgggcatccggtttcttcaaatccggcacgtcctctttgcgagcgccggctttcaccagttggtcgatgatcttgcgccctttgacgccgccctcgtgctggcagatcaccacgctggagccgttcggatccttggcggcctgcttggtgtacgtcaccagagcttcggcgagcttttcgtcggcattctgcaggttgacgagtttgaccacggcaacgtcggaaagcaacgatgggctgacggcttcatcgaaggcatattggtcggccgatgtggcgtcgagctcgatgagttcggcgtcgggtcgcgccttcaacgcttgtgcgcacagtgccttggtgcgcgcgtcgttcaaatacgagtcgcctccgggcaccacggttaccggtacgttcgctgctgttttcgccatgcccccatctcgccacacaggttggacaatgacctgccggcataacggcccggcaactccctgcgattaggcgtatgcctcgtccaacagggcgtcgatatccgcgaaacgcttgggaccgggacgccataccgggtgaccggccgcgatgaccagtgccgggtgttccaacgcgcgcaggtcgtccagcggattggcattcagcacaagcaaatcagcggatttgccgacttccaaagaaccggtctcggcatcgacgccgagaatggaggcgttgacggcagtggctgcgtgcagggcctcagccggactgaaaccggcatatgcgaccagcagctccagctcacgccatgtggcgtactgcggcacgaatgtcatgcctgtatcggtgccgacgcctatcatcaatccggcctcgtgcgcctgacgagcacctgaaaccatgcctccgaccacgtttttggaattctccaattggatgtcggtgatgccggtcacgtcctgtccaagcaaggtcaatggcaggccggcggacagtgtcggaatcaatgccgagtatccgcgcaacgcattcggattgtgccggaacatgccgatcaattcgtcgtcgagcacgctgccgtgttcgatggtatcgacgccggccagcagcgaacgccgcacgccttccgggctttgcgcgtgcgcgccgacaataacaccgtactgatgcgcctcatcgcaaatcgcccgcatctgttccacgctcatctgcgggctgccggcctcgccgatttcctgtgcatcggttacgccgccggtcgcggcgattttgatggcgttgacgccagccttgagattctgcgcgactgcggtacgcgcctcttccggggtgccgctggtcagtgcgataagcggggcgccatggccttcgggaatcgccatcagcggtccggatgccaagatacgcggtccgaggatttggcctgcatcaatctgatcgcgtaatgtcacgacttcatatcccacgtcgccaagcgtgcggatcgtcgtaacgccggattccagcaatgttgtggcgttgtgttttacggttgcggccatgtacggcttgcccaatggcgaatgcgcgaatgtggcgaccatacgttggcctttgggcgtcgccagcttcggattgagcggcttgccttgggagaacagatgggtatgcgcattgatcagccccggcatcacgattttgccggtgccgtcaagatagtggtattcggctgggatactggtttcgatgctgggtgcaacctgttcgatacgtccgtcggctccgaccacgatcgtcatgttacgcagtatggttccggctttatctccggtgacgatggtggcgtgggccaatgcaaatggttcgactatcggattatgagacaacatcatcgccggcactccttcatgcagctggttgaactggtctcaactgtatcgcagttttgccggctgatggtttatgccgcgcggcctatcgcataggttcggctggctattgcgatggttgctgcaccgaataccgcattggctattcggcttgccgccgcgtaaagagacgtctcgtctcctcgcaccagagactgaggcggacatgccaagcggaaccgaagcgcacgccaggcattccggcctcataacgacggacatgctggaggcaacggctgacgaacaccagtagcatgccgataccgatttccaccgccacaatcagcacggcacccgtaacgccgtctttccatgggatgacggccatcgtgctgccacccagccacaacgccacccgttccatcaccagcgtgccccatgacgatatccacgcgaatacgccggccagccatggctcgcaccatgcgcaggccaatgccatcaatcccgccatcgtggccaatcccacaaacggcgacaccaacaggttcgccggcacggacagcaacggcaactccggttccatcaacacctgaatcggcagggtgaacaactgcgcggccacggtcatcgccatcatttcggcgatgccgtgcggcatcgctcgctcaaaggcaccggccagccgccccgcaaacagcacgatacccagtacggcggccgaagacaaggcgaatccgtagctggccgacatatccggattcaccgccaatacaccgattaccgtccagcacagggcgctcaacgcttgcgtacgccgccccatcgcatacgtcaacgcacctatcaatcccatgatgaacgcgcgggtgaccgaatcactggggaacatcgccaatgccagcagcacatatactccagagaccagcaacgccgtcagccgccgatcaagcagcatccacatgcataaccggcgcaccaatcccgccaccagtacaaagtggccgccggatacggccatgaggtgcatgatgccggactggcggaactgattatccaacgtttgcgcatacgtgctgttgaccggcatcggaccggtctcgccgccgatataatcctggccaagcacacccatcgtcaatcccggcaccaacacacgcccctgatcggacaattgttcggtcacggtgaaaaacgcctcctgcacatgcgcaatcgcggcgagatgccacggcggagcccgcacctgtgctaccggctgttttccttccaagagcagccatagtggtatgcgtccatatcgcgcttgctgcaatacgcctgtcagcagatagaccgcgcctcgacgcaactgcccacaatacgattcgtcggcgtatacacgcacagcgaccgcggaacgtacatccgtaccatccacagtgatgccgctcagccgtatgtccgtctgacaatcgtatgtgcgttggtccgaagcgatcacgggcgtcgtcaccgtggccatgacttcgtggtatgaactggattggcgagcttgtgcggaggcaggatcatgccaggcaatggtgtccgacgcgattgccgtcatactgccgatgcacgccaccgcaacgcatacggtcaatgttcccgtccaccggatccgcaggcggaaagacaccacaatcatcgccgccacgacagcacatgacgccactgttataggcaatattcgtgtgacaggccattccatgccgattatggtgacgtcaatgccagctccggcatcagcctttgcctgaccggtgccgagtccatcagacatcctccatgcgaataatgcgtgcgctcccagactcgccgcccacatcactatggcgatcggcagcatcctccaatcgcggctcccctgctcgcgcagtatccaatccctgctcatccgaccgtcacctgccctcgcatggtctccaacgtcttggagccgatgcctttgacatccagcagctgatcgactgatgtatacccgccaatcgccgtgcgatgatcaatgatccgctgagcggtaaccggcccaatacctttgatggattgcaattcctcagcggtagccgtgttgaggttgatgagaccatgcgtggaagcgccggcatcgctgccgtccgtctgcatgtgcggagattgcgtggtatccgattcggggttcgctgtggcatcggaatgctccgactgctgcggatccgtgcgtttctcgtccgtggtgttctgcgatggcatcgtctgatctccagcggagccgcccgtggtctgcatggcggtcggttgagacagcatggccatattcatcgactgttggaccagcaatgccaagctgatgccaagggcgacgatcagcagcaatatcacggccaaggcatgcccaatggtgaacgacaatcgcggctgatcccgggtgagtctggctgattcgccgacggcatcggcggaacgtacgccaatcagatccgataacgcacgtttgtcacgggtcgcctgccgcaggccgctctgcgccctttggggcgggtggccggccggacggatccgtgcatggccgggaggcggcggaggcgtcgtgggccgttccactcgcggttggggcatggctgcgctctgcctgctgaatgcgcgcaaacggttggcggcatggtctgcgcgatggttatgagaaacgcccatgcatccacgctgatggattcatgggcgtttgtccagctgaaacggggtatgtggttctagcttatgaagttatccacaattgaggtgggcggttgacgctcccctcagtctcgctacgcgagccagctcccctcaaagaggggagctggctcgcaacaagtcactccgcgggaacgatggagacgatcttcggggccttgacgatcaccttgcgcggctccttgccgccaagacggtcggcgacggcggccagcgcctgcttctcgagatcggccggatcgatgtcgaccggcacttcgagcttggcgcgcaccttgcccttgatctgcaccacggcggtcacggtgtcgtggcccacgtagcgttcgtcggccaccggccacggctcggcggacagggattcggcgtgaccgagcttgctccacatctcctcgcagatgtgcggggcaatcggcgcgagcatcaggatcagcggctccacggcggcacgcggcacagccttcagaccggtcaggtggttgttgagcacgatgagcttggcgatggcggtgttcgggcgcatgccttccatttccgcggtcacttcggcaatcgtgttgttgagcagcttcagggtcttttcgtccggcgtgtcctcagtcacatgggcctggccggtggtctcatcgaccacattgcgccacagacgctgcaggaagcgcatgctaccgaccacgttgcgggtgttccacgggcgagactcgtccagcgggcccatgctcatttcgtacaggcggaaggtgtcggcaccgtagttctcgtacatgtagtccggggtcacgatgttcttgagggacttgcccatcttgccgaactcgcggttggcatgttcgccgttccaggtgaaggtcggctcgccggaggcgtcggccgagccttccacgacctcgtcggccggcacgtactggccgcggtcgtcggtgtaggcgtaggcctggatcatgccctggttgaacagcttgtggaacggttcggccgagtccacgtagccgaggtcgaagagcaccttgtgccagaagcgggagtagagcaggtggagcacagcgtgttcgacgccgccgatgtacaggtccacaccgccttcatcacccgagtacttgttgtggttcgggcccatccagtagtcgaactcgtccttctccaccatgtgcttggtgtcggtcgggtcgatgtaacgcatgtagtaccagcaggagccggcccagttcggcatggtgttggtgtcgcggtagtaggtcttcttgccgtcgcccaagtcgagctcgaccttgacccagtcctcgttgcggctcaacggtgcctccgggttggactcggcgtccatcggatcgaaggtgcgcggctcatagtcgggcacgtcgggcaggttgatcggcaatgcggaatccggcagcaggtgcggggtgccgtcttcgtcgtagacgatcgggaagggctcgccccagtagcgctggcgggagaacagccagtcgcgcagacggtagcttacggtgcccttgcccacgccggcggattcgagccaggcgttgaccttggcgatggcgtcgtccacgcgcaggccgttaaggctcagcgcgtcgcccttggcttcggtggcctcgacggaggagttgatcacgatgccgtcatgggagacgaacggcgccttgccctcgtagttggccaagtcgtcgccggaatccggcagaggcgtgacggtgtagatgacaggcagaccgaacttcacggcaaagtcgtaatcgcgctggtcgccaccaggcacggccataatggcaccggtgccgtagtccatcagcacgtagtcggcagtaaacagcgggagcttcgcgccggtgatcgggttggtggcgtacaggccggtgaacagaccggtcttctcaccggcctcgtccacgcggtccttggcggtcttggcttcggcggccagacggtaggccttcaccgcctcgaccgggttggcatagccgcccttccagtcttcgggtacatcggccggccattcggcgggcacgttctccagcaggtgatgttccggggaaaccacggcgaacgtggtgccgaacagcgtgtcgggacgggtggtgtagatttccatgtccttgtcaccgtcggcagtggccacggtgaagtgcacggaggcaccatgggattcaccgatccagttgcgctgcatgagcttgaccttctcaggccagttgatgccgtcaagatcggcgatgaggcggtggccgtacttggtgatgcgcatggaccactggcgtagctcacgctggaagaccgggaagttgccacgctcggacttaccttcggcggtgacctcctcgttggccagcacggtgcccagacccgggcaccagttgaccggggacttggagatgtaggccaggcggaagtcgttcaagatatcctgctgctcggcgtcagtgaggtcggaccactgcttgccatcggactcgtggcccggaatggccttttcgccggattcgaacttggccacgagctcggcgatcgggcgcgcggagcccttggagccggacgggttggtggcgtcctcgtcgtaccaggaatcgtagatgcgcgagaagatccattgggtccagcgcacgtagccggggtcgatggtggcgaacgtacgacggttgtcgaagctcaggcccatacggtgcagctggcggctcatgttggcgatgttcgcctcagtggtcacgcgcgggtgctggccggtctggactgcgtactgttcggcaggcaggccgaaggcgtcgtaacccatggcgtgcaggacgttctcgcccttcatgcggtggtagcggctcaccacgtcggaggccaggtagcccagcgggtggccgacgtgcaggcccttgccggacgggtagggaaacatgtccatggcgaagtaggcggtgcggccttcggcgttacggcccttgccgtccttcaaatcgccgttgacgttggcggcccagaaggtgccttgctcgtcccaaatcttctgccactttttttcgatgtcctgcgccagtgcggcgttgtagcggaagttgggctcttcggtttgcgtgctcttctcgttgtcactcataaatcagcaaggtagcctcgcaactggacacgtcgtcaatcgttattcagcatccgagacgatggctttggggtcgccgttcagcgaaaccgtgagctttgtttggcttgtgaacgtatccttggcggccgtccagctgccatcctcaaccatgtcttccaatgcttccgcgattatctgcgccaattggctggtgccttgactcacggcgatgccataactgacctcgcccttgtccgcaatcacgtccatatactggggcccgttggccgcttgaagaccggaaagcaccgccatatcggaggctatggcatccgccgaccctacttgcacggccgtgacgcactgcgcataactgctgcgctcctgaatccgggcctgcgggtggttgccgcggaagatgccgactgcctcgtcacctttcactgcgcacaccgtgccgtcgcctacgtcacccaccgaacctgcgtcattggtgaatcggccacgctcatccgacctgaccagcaaaccgacgctggtcgtgaggtatggtccggcaaaatcaacgatcgcgctggacccatcggtgataggccaagaggcgacgaccatgtcgacctgtccattgtccagcatggagcgccggttttcggggcgaacctgtttgaagacgatctgcttgttcgcatagccgagtttggcggccacgtatttggcgatggtgatgtcgaagccctggtatgtgccgtcatgccatgctcccaccgatggctcgtcggctgcgaccccaatggcgatggtgggcccctccggcgctccggagacggtggtgacttgaatttggccgcaaccggccagaccggataatggcaatatcacgccaaaggccgcggcgaatcctgccatcagtcgggagcgaaatccgcgccgcatcggacggcgagcgcggagcatgctacggctggcgaacgatgaccagtggtgcataaccgtcaaacgccttacttgaacatgcgcgaacgtgtgaggaaccaggcaaccgcaccggagagcaccatggaaatcacgataatgagcatgaaaccccacggcttgtcagtgaacggcatacccatcatgccgccatcgaagttcatgccgtacatcgagaagatcagggtcgggatggacagtgtgatggagatgatggtgaagatgcgcatcacgttgttcaggttgttggacacgatcgaggcgaaagcgtcggtcatgttcgcaagaacgccgctgtaaatgttggccatctcgatagcctgcttgttttcggtgatgacgtcgtcgagcaggtcctcgtcgtccgggtattgcttgatgcgttgcagggtggtgagcttctccatcacgatttcgttcgatttcagcgatgtggtgaaatacaccaaagtcttgctcagctccatgagcatcacgatctcgcggttctgcatggagtggcgcagcttcagttcaagcttgtcgctttcgcggtcgatgatgcgcaggtaacgcaggtacatcgtggcgttgcggtacaggatctgcaggatgaaacgcgaacgcatgaaggtgttgaagcctcggatcgtgccttccatgaatgggtggagcacgggcgtgtcctgcatgcagacggtgatgatgaggttttcggtgacgatgatcgacagcgggatggtctcgtaccagtcgcgtccgccacgctcttccacggtgggaatgtcgacgatgatcatcgtgtaatcgtcttcgacgtctacacgtgaacgttcctcgtcatccaaaggggcacgcaggtcggccaggtcgatgccggtttgcgaggcgacggtggcgagctccacatcagtgggttcgctcaaacataaccaggagccgttttccggtttctcgatctgctccacttggccattgattgagctgaagattctcagcatgtcgtctcacccgccttccgcgctttcttactgttctatcgctgtacggttccaaaccgagattagtctagacccaccgttcgaatttgcgagcggggtttcgcatagcgaccatcaccagacgattggctgccaacttggcatgtgcggtcctcgcagatcggtcggcccgttctcccagtcggcgctgtcggcgatggcgggagccttgttgtattcctccaactcccacaggggctgttcgatgggggtgccgttgacgctgtggcgcactttgagccggcaccaacaggcgttgcgcatgccgccgagtgcgttcatgccgtccgggtcaagttcgagcaggttggagatggtggcggtaatccatgagccatgggtgacgagcatcagcgtggtgggcgtgctgtctgaataggcggagtcgatgaccagtgcgcgcacggcatcggcacctcgctgccccacggcggcacggctttccacaccatgcttggtttcgcccccagtgtgctgtttccaagaggcgtagtcgtcggctgccacggctttgatttcggcgcgggtcatgccttcccactcgccgaagctgcgttcacgcagtcgttggtcacaggtgactggcaatcccaaaatatcggcgaaggcgtgtgcggtctgttgggcacggaacaggtcggaggtcatcaccaccatgcgccggccggcggcgggagcctcctcgaactggcgcgtatcagtgcgttcggcggcgtcaggaccgggctgggcgatggcttcgggatgctcggcaagtcggttcaccttggcccagtaataccgtgaagcgagcgtgaatccggtctggtcaacctgccattggcctacgatgtcgagcggcacatcgatctggccttgcaagcgatgctcgagattgtattgcgtacggccatgacgcagcatcatcacttcatcgatcatcggttttcgccacctcgttctcttgcggtttgccatactcatctcagcacaacccctagaatggcggcatggagatttctgagtcgacttgggcgttcatcgccaaacaccgccgtgaagatgtgcgtgatgtggccttgcacgccaagcatgatggcgacgtggatgtgccgttcgcgctggagcaaattgccggctggcagcgcgcttcactcaagctacctgactgggcgtcccatgatgggctgattttcccgccgcaagtcccaatggaacaatgttccagccaattcaccgcacagtacaaggctcggctggcacagcgattgttggccgaagaagcagtcgacgacgactccccgacatccctagtcgatctgaccggcgggttcggcgtcgacttttcttacatgtcccgagtgttcaatcgtgccacatatgtggaacaacaatccattttatgtgatatcgctcgccataatttcccgatactcggccttgaccacgccgaagtcatcaatgatgattcaacagcagtgcttgacacgcttggccgagtctccataatcttcctcgatccggcccgccgtgacgatcatggctcgcgtacctacgcgattgccgattgcacgccggatgtgctgaccctgaaggatatgctgctggccaaggcaccgacggtcatggtcaagctctcccccatgctcgactggcataagaccgtcgccgatttcgccggcgcggtacatgaggtgcatatcgtctccaccgggaatgagtgcaaggaattgttgctggtgttggggcgcggccgttacgcctcaccgctcgtggtatgtgctaatgacgagcaggtgctgtcgtacaaggccggcgataacagcgacaatcacaccactatcagcgattctgccttggctgcacgcaatacttgcaataccgaagactccccgtctgaggaaagcgcgaacgacttcgattcctcgcattggaagtacctttacgagcccaacgcctcaatcatgaaggccggatgctttgatgttctcgaacagcgcttcgccgtgcatcacatcagcccgaatagccacctgttcgtggcggccgaacctattgccgattttccaggcaggtcattcgccatcgaatccatcgccaccatgaacaagaaagaactgaagcaactattggccggcctcacgcacgccaacatcgccgtacgcaatttccccctaaccgtggcccagctacgcaaaaaactcaaactcaaggacggcggcaacacctacctcttcgccaccaccgacgcccaaggccgtcacctagtactgcgcactaaaaagcgaaaaaatggctccctctgacgaggaagccaccaatacgtcagctaatcagtccttggcgatggtcttgccggcggtcggaccggaggcaaggtcctggatctcggtgacttcgagaaccggaatcacggccggcttcttggtgcccttttcctcggcgaccttgacctgctcgttgtagatgtcgtcgtcaacgtgcagcaccacgttgccgcggaagcggtagccctgcttcttctcgaggttggcgaaagcgatgaccagcggggaaccgttcttgaggttctcatagtgctggccggcggtgcgctcgtggtaggcgatgtgcgtgtcgtccagcacgaacagggacatcttcgggccgaggtccagttcgccgtccttggagacggtggtgatccagccaaggttgttcttgatgaattccttgatttccggagtaatgactgccatgtcgaatcctttcatgattgctacggataacgtatccttactctttccagagtaccggttccgaacgcgactagcccggatgttcgctgtgagtaacctcaccttcgcacagctttcatccggtttttgcctgcttggcgatgccatgccccggtcgcgcaccagccacacacctgtcacacacccgacacccatcgaccggtcgattttggccggtagttcccgtaatctgtgagccgagagagccacaagttttcctaactgtcctgaggtgcaccatgggtttggtcgaacgtttcagcaagctgcgcagccgctggtcccgcaactttcccccgaatctcgcccgactcatgttgctgggctgcgctgcattatggggtggcagctatctgctcgccaaattcgccatggaggcgattccgccccaatggctgatgggtctgcgcatgatcggcgcctgcctgtgcatgctggccttgttccataagcacatcgtgccgtatctgacgccgaaaatcattgtgccggcgctcgtggtgggcctgacctactggggcacgatggtcacccagaccatcggcctgcagaccattgaaccgggccgcagcgcgttcctgacggccgcctactgcgtactcaccccgttcgccacgtggattatttcaaaaaaccgcccgaaggccatcaatctggtcgccggcgtgatctgtctgatcggcgtcggcttcgtctcgctgaagccgggcggttcgctgtcgctgagtgccggcgactggctgaccatcgccaccgcggtcatcttctcgttcaatctgacctgccttggtgtctacaccaaacgcttcgaccctatcgccgtcacttttgtgcagttcggcgttgccggcgtattgttcatcatcggcgcgttgttcaccgaacccatgccgaacgccagctggctggcaccctcagtagtggccagcgtgctctatctgttcctcggcgccacgatgagtgcccagatcatgcagaacatcggtctggctcacgtgcctgcctcgcaggcgtcaatcatcatgtgtacggaaagtctgttcgccatcacgttttccgctttgttctggggcgagaggatcatgtggagctcactggtgggtttcgctttgattttcgccgccgtactgatgtcggtgatcagaccgaccgggcagtcgctgcaccggaactgacgattcagtttcggccatggatggtcatgggttctccattgccctgaaccgttacggtgaaggccgaggctcttgaaggcgtgcaatcggaaatcggacttggcatcgccaaactgcatttcgagttgggtgccggcaacggcagcttcgcttgggctgcatgacgttctgctgaacgtcgttttcgctccaagcgaaccaatttcggttgttctttgcgctactttgcgccactttgcgctgattcccactgctcatcggcaccatatttttgagtcattccacattccgctggctaggttttgaaggtctcgtgtaggcatcctctcggtatcaccgagccttaagcaaccttccagcccgacactttacggtcgtgtcttgtgaagaagtttttcgaaggtctttccctctcatccatcgtggcgggcacccttgccgccgtcacctcattcttactggcatcgaaaatcggtatcgccggctcggtaatcggcgcggcagccagctacatcgtctccgcggtggccaccaaaatctatcaaaacatactcaccgcctccggtgagaaactacaatcggcctcgtcttccggcaacgacgatgacactacggccaataagtccgataaggcagccgaatccgagtccgatacgacgatgaccggcatggtcaataccgtttccaccgcgcgcaagccgcgcgaagtcgtgtccaatcgagcgaacggacgaacctattcggtcaatgaactgcgcaaggcccgctcccataattcgaagcgcaccgccattatcgtcacgctggtatccggcctgctcgccgtggcagtaaccgccggcatcgtcatgctggtcacgcagggccgtggcacggaccatatcatcactccgtccaccacgcccacgcaaaccgacaccaaaacgcagaccgacacgtccaatcagaataacggactgccgcagccgggcattaccgacggttcgaatgattccaacaccaaggactccacatccggctcgtccaacgacggcaccgattcaagcacgtccggctcaaccggcaccgactcctcaaccgattccaacaccaatggatccaccgatggttcgaccggcaccgattcctccactaattcgggcacgactggcggttccaccggttccggcaccaccggaggcaccaccggcaccggcaacggttcaaccggatcgggttcaggatcagccaatggctccggttcctcttccagctccacgggcggatcatccagttcaaactccggtaatagcggttcgagcggctcctcaaccggtagcagcagcggaaccggcatcaaattcattggctgacaatcgccgactcgatagcagcgatggcggcaatgccagtcaatgacgtggggcaatgagaacatggaacgtatgactaccatcattatgaatacctctgagggcagcatcaccatcaacctgttcgacgacaaggctccgaacaccgtggccaacttcctgggcctcgccaccggcgagaaggaatgggcggacccgtacaccggccagccttcccacggcaagttctacaacggcctgaccttccaccgtatcatcaagcagttcatgattcagggcggttgcccgctgggcaccggtaccggcggccctggctacgagttcgacgatgagatcgacccgagcctgaagttcgacaagccgtacctgttggctatggccaacgccggtctgcgtcgcggcatggacggtaaggtccatggcaccaacggctcccagttcttcatcaccaccgtgccgaccccgtggctggacggtcaccacaccatcttcggtgaggtcgccgatgacgactccaagaaggtcgtcgataagctcgaagcactggacaccgatccgatggatcgcccgctcgagccggccgtgattctgtccgtggacgtggcggagtaagaccgacaacatatacgaaaaggtcctgattctgaaccgcaccccgattgttggactgaagtaattcagattcgatgatcggaggtgcggtttctcatgtgtagggatcgcaggcgtcattacgatgacggtttcatgcgggtcgtcgccgacctgatccggggcggggccgggaggcgttctctcgcccgccggcttggcgtgcccgtcagtaccgcgggaaaatgggtgttgtcataccggtttggcggggaggcggcgctcatgggagaacgcgaaggcaacaggagatacgactacgagacgaagctcgcggcggtgcgcgaccatgtggagcatgggctgacgaaggccgaagtcatggagaagtacaggatcgcgggccccgccccgttggagcgctggtgccgcgagtaccggtccggcggcccggacgcgctgcgtccgaaaccgaagggcaggcccaggggcgcgaaatccaagccgaggccggctcccacaagggaacagctccttgaggaggagaacgcgtacctcaaggcgagggtcgcgtacctggaaaaagtcgacgccctgctggcgtggagatcggcaaccgggacagaacggtgatcgtctccatgctggcggggctgggacatcggctccggcacctgctcagggcggccggactggcgaaaagcacgtattaccatcttctgtcgcatccggccgccgtgacccggccggacatcgagccgatggtcgccgagatattcgcgcgcacgcccaacgggtgcggccaccggcagatacgcatgtgcctcgtgcacgagttcggggtgcgggtgagccacaagagcgtgctgaaggtcatgaggcgcatgggcctggaatgccggatacgcaggccgaacccgtaccggaaatacagctcgtaccgggacgagacgggcgcgagggcggagaacctgctgaaccgcgacttcacggccgaccggccgtgggtgaagctgggcacggacgtcaccgagttcagggtcgccgacggcaaggcgtatccggctcccgtatacgatatgggatccaaggagatcgtggcctgggacgtcagccggcatcccgacatggcccagcagcggcgcctgctcgccatgctcgaggagaagctgcccgaagacgccgacccgatcccgcactccgacatgggctggcagtaccggcaccggtggtggcgcgaccggctcgcgggactgaacatccgccagtccatgagcaggaagggcaactgcatcgacaacaccgcgaccgagcaggtgttcggccacctcaaggacgagttccacgccggacgcgagttcgcctcatacgaacagttcaagaacgaactggacgcgtacatcatccactggaacaccaaacgccgccagatacgactggagggacacaccccggaggaattccggaacatgtccctcacagcctaatcaggtacccttaataaaccacgtccaacaatcggggcgcagttcaggtattccagtcaggaccttttcgtgttcttggctcccctctctgagagggagccagagtaaggtaacggcctacttcatcttgcgcagtcgaggttcggcggattccttggcaccagtgatgcggtacacgtcgaacacgccatcaatcttgcgcacggctgccagcaacgagttgagatgctgcggatcggccatttcgaagctgaactggctggtggccacgcgatcggaaccggtggcgatcgtaccggaaatgatgttcacgccatggtcggaaagcacacgtgtcacgtccgaaagcaggtttcgtcgatccagcgcctcgacctgaatcttgaccatgaacaggcccttggtgctggtccattcgacctcgaccacacgctcggactgcttgttcttcaggtcgatcatgttctggcagtcggtgcggtgcacggacacaccctgattgcgcgtgacgaagccgatgatctggtctcccggcaccggcatgcagcaacgggccaatttgacccacacgtcgcccacgcccttgacggacactccggtagagctgctggaagttttgcgctcgatgggcttgagcggcagagcctcctgctcgacctcctcatcgacctcgtcggccccggcatccttgaccagatgcgagatgacgttctgcgtggagatctgcccatcaccgatggcggcgaacacagcgtcggcgttcgggaaattgaggtcgtcggccacaccgatcaatgcctcggtggtcagcagcgcattgaccggcaagttacgtttgcgcatagcgcgggtcagttcgtcgcggccttcctcaatagcctcggtacgacgttccttcgagaaccactggcggatcttgtttcgtgccttcgggctcttgacgaagctcagccagtcgcgcgaaggaccggcggtatcggacttggaagtcaggatctccacggtgtcgccgttgtcgagcgtggtgtcgagcggcaccaaacgcccgttgacgcgcgcgcccatcgtacggtggcccacttcggtatgcacggcataggcgaaatcgaccggtgtggcatgggccggcaaagagacgatcttgcccttcggcgtgaagacatagacttcggacgagccgaggtcttccttcagggaaccgaggaattcgttggaatctggggtttccgaagtccaatcggcaagctgctgaatccatttgagattgtcggcttcggaaagctcctggttcttctcgtcacgcctgcggtcggacttgtccggcgagctcaaggcgcgcccggcctgaccgttctccttgtacttccaatgcgcggcgatgccgaactcggcgcggcggtgcatgtcccaggtgcgaatctggatttccaccggtttgccgcccggacccaccaccgtggtatgcagcgactggtacatgttgagcttcggcatggcgatgtagtccttgaaccggccgggaaccgggttccaccgcgcatgcacggcaccaagcgccgcatagcagtcctgaatggtgtcgacgatgatgcgcacaccgaccaaatcgtagatgttcgcgaaatcatggccgcgcacgatcatcttctggtagatggagaagtaatccttcgggcgtccggtgacgtatgccttgatgttctgctcgtcgagatcctcgttgatctccgccagaatctgcttcaggtacacatcgcgctggccggctcggcgagccaccagcaccacgatctcgttgtagatcttcgggtagagcaccttgaagctcagttcctcgagctccgtcttgatggcgttcataccgagtcggttggccaaaggtgcgtacacgtcaagggtttcacgcgccttcttctgggcggacgtggtcttcacatagcgccaggtgcgagcgttgtgtacgcggtcggcgagcttgaccaccaaggtacgcacgtcgcggctcatggccaccacgagtttgcgaatggtttcggcttgggcggaatcacccacttcaagctgactcagcttggtaacgccatcgaccagaccggccacggtgtcgccgaattcggcgcggcattgatccaacgtatagtcggtgtcttccaccgtgtcgtgcaacaggccggctgccaccacgatcgggcccatgcccagatccgcgagaatctgggaaacggccagcgggtggatgatgtacggctcgccagacttgcggcgctgggcggagtgctggatgacggcacgccggtaggcacggtcaagaatggacaaatcctcatcggggtgatgggacttgcacaccttcttgattggatccagcggattgagcggatcggcactgatctcacaacccaacttacgggcggcgtactgctcgccatcaatctctgccatgccagtcacctccctcgtcatgaagttcattgtagccgcgaaccggagccttgtgcattcacctgttcgccatcattggttccacaaccgttgttgccgtcatcaccttagtcattcaaccggcctaatccggtcaggacgccactcccgtcgaaccgaacccgcgttcggcgcgatcggatccgggcagtgtctcggccgggatgaaccgagcctcaacataccgctgaatcaccaattgagcgatgcgatcgcccggatggaagacggcggtgtgcttcggatcgaggttgatcagaggcaccttgatctcgccacggtagccggcatcaacggtgccaggcgcgttgagcacggtgacgccctgcttggcggccagcccggaacgcggatgcaccaacgccacgtagcccgcaggtagggcgatggccacgccggtgggaaccagtgcccgttcaaaaggcttcagcgtcacatcgacggtggtgatgaggtcggcaccggcatcgcccgcgtgggcatagtgcagctgggccggatgttcggggtcgaggctcttgaccaggacctcggtggattcgggctcgttgtaggtctcgtcgaacgccatcaggcggcgcactcctcacacaccggctggccatcctcgtccgtgtaggcgagctggctgcgatgcttgaccaggaagcactgcgagcagatgaactcgtcaccctgcatggggatgacggtcaccgaggaatcctcgttgctcaaatcggcgcccggcagttcgtagtcttcggcgatggcgttctcatcgtcgtcgatgtcgctcgaggcgttctgcgaggacttccccagcgcctgcagcgattcctcgtcctcatccttgttgcggggggaatcataatcctgagccatcatggtcctttcgtcgtctttggttcgtaagtcgatatatatagcacggtcagcgccatactcgcccataggatacacgatttgaaatactcgtaaagttcgacacgtggggcatacttaaaagaagtaatgtctttgcgacggaaagtggtgcgaatatgccagatgatcggcttgaaaaagcccgtttcgtgcgcgtgagcaagacgggggacctcgtattctcccttggcggcagggaaatggctgtgagcgtggacgacacgctcgaacgggcgattcttgaggccaagcaggtcagaagcgagatgcgacaggctccccagccgcatcagcagtccactttgccgatttcccagatacagtcgctgattcgcgccggtgccgatccggcccgtgtcgcggagaaataccatctgagcgaaatgctggtacgtcgtttctccatggctgtggagaccgagaaacagtatgccatcgaacagttccttgccgtggcggcacccaaagacagcagggtgcgcaccatcagcgaactggtggaacgcacgctggcctctgcgggaatcggcatggaatcagtgacctggaaatccacccgacgtggacttgagccttggcgcatcgtggcgatattcacttccgcgggccgtgagatccatgccgaatggacgtggaatatgcacgacaattccgtgatgagcctgaacaatgccgctcgaaaactgctcggcgaacagaatccggaatcagccacggattccaaactcaagccgacgattcccgaactgcccggcgactccgtacgctccgcgcgtatcgagcgcgccgtgtctgcttgggcggctcctacgccttcgattccggccgcacggcctgccgcaatccggccctctgtcacttccacaggttccatgcccccagtggatctatccacgtccatctcgccggccacgacccaggctcatggcactacggcccccagtccggtctcttcgcagaccgccggatctgtttcgccatctgccgcaggattacagcaatcgcctgccacggcaccagagcagggctctgacaatgtttcggacaagaccatacggagtggccccaatgcacagctggtagacaccgagcaggagcgggcggccgaatccgccgccaccgaacatgaggcaccagccaaaccggccaagcgtaaatcaggacgttcggccgtaccaagctgggacgagattctgttcggagactgaatttccgaatcaggccatatcgatcaggcagggaatatccatttccaatgctgtttgggaaccatgcacgctcggcaggtgggtggccttgtctccttgcgtacgcgaatcgacgagggtcacggctcccgctgcctgcacgaccacatcgccgagcattggccggactcgctcgcagaccggtccaaacaatccgtccgcgatggcctcatccttggtccgcaccaaggctcggtcttgcagacaatcgcgccaccggcaagctatatcctcaggtcgttcatccggctcgacatacagcatcagcgagcgcggctctcccccgaccagtgacacgcctcgggtgagctgcggttcaacggcgatgtcaatccgctggtccatgtcggtttgcaccatgccgtggtcggctacgatgacgatcagcgtgcctttgggtgcgctgcgtttcaggagcgcgagctgggcgtcgatatgttcgaatgcggccacccagtgttcggaatcccacccgtaattgtggccgactttgtcggcgtcacggatgtacaggtaggtcaggccgggggtgcgggaggcgcgtgcggcggccagcacacgatcgcgtggggtgacgttgccttgatagtcggtgcctcgcaatgcggcttcggtcaatggcgatttggagaacttgggcaaccccgagctcgtgacgcgcacctcttgagccgcaagtttctcgaacaccgtctcctcgcgctgcaggtcgagcggatcgaccatgggcggcacaggaatgtgcggattggctggtttgggtgccagcgcgtctttgaactggatgagttggatgagcttatggctggcgggttcgagctgcgtatagcccgccattgcggtcagtcccgggcaggttccggtaccgaatgcggccatggccgccacagtggtgcttggagcgcaggtagcgatgggacgctgattggcgctttcgttcatcagcgaacgcagatagggcgcgtggccgaggcgcatggcgaggttccagtagcccaggccgtccacgagcaccacgatggccgattcggcatcaggcagccccaacgcgcgctggcaggccttgggatcggcgtggaccttggtgggggtcggatgtccgatggcggcggacaaggcgggcagcacggcggacaggtgcagtgctcccccacgccgatcggccggggcgtcatccccatagcccactgtgggcaccagccgcagcaactcgtccatatccggcgtctcaacactcatagttgcccattcaagtagcacccctccccttggctcagtgcgcagagaacggttctcgataacaactgtgcgctccagcgcacataatcaaacaaacgcacatcgactgaaacactggaatcacgccgttttatcggcaaacatgtgcgattggcgcaccgaaaccagcgcacagttgttatcgagaaccgttctctgcgcactgtttcgcgccctcccgctaatatgggggcgttcgaaagggagtttcatggcatcacaccgcaaaccgtccgcgcaaacctacgatccgcgcacggtcaaggagcatatcgtcgagacaccgctgaacgaggagatgagcaagtccttcctcgagtatgcgtattcggtgatttacgcacgcgcactgcccgatgcgcgcgatggcttgaagccggtgcagcgccgcatcgtctaccagatgggcgagatgaacctgactcccgaccgcccatatatgaagtccgcccgcgtggtgggcgaggtgatgggcaagctccacccgcacggtgattccgcgatctacgaggccatggtgcgtttggcacagccgttcgcgatgcgtctgccgctggtagacggccacggcaacttcggctcgctggatgacggccctgcggcctcccgttacaccgaggccaggcttggcccagccgctctcggcatgaacgcggatatcgatgaggacaccgtcgacttcacgccgaactatgacaacaagctcaaggaaccgaccgtgctgccggccgccatcccgaatctgctggtcaacggcggctcgggcatcgccgtgggcatggccacgaacctggccacccacaatctgggcgaggtggtaaacgccgccaagttcctcatggcgcattcggacgccaccctggaacagctgatgcgctacgtgcccggccccgactggcccaccggcggcacgatcatcggccgcgacggcatccgtgaggcctatgccactggccgtggtacgctcaccacgcgcgccgccacgcatatcgagcatgtcacggcccgcaagcaggccatcgtggtcaccgagctgccgtacatggtgggcccggagaaggtaatcgaacgtatttccgacggtgtgaagaaccgcaagctggaggggatttccggcgcgttcgatctgaccgatcgtcataacggcacgcgtatcgtcatcgagatcaagactggtttcgacccgcatgcggttctggtgcagttgttcaagcacacaccgttgcaagacaacttcgccatgaacaacgtggcgttggtggagggccgcccgcacacgatgggtctgaaggagatgcttcaggtgtgggtggaccaccgccgtgtggtgattcgccgccgcagtgaatatcgcaagaagaaggcgctggagcgcctgcacctggtcgagggcctgctgctggccatgttggacatcgacgaggtgattcaggtaatccgcacctcggatgatgcggatgccgcgaagagccgtttgatggtcgttttcgatttggacgaggtccaggctcagtacatcctcgacctgcgtctgcgccgactgaccaagatgaaccgtatcgagcttgaggccgaacgcgatgatctgaagaagcgtatcgaggagctgacccggatcctggcctccgccgaggcgctcgaccaggtggtcaccgacgagatggacgaagcggtcgccaagtggggctcgccgcgccgtaccgtgctgctggatgccgacccggatggcacgttgacgccggtcgtggcgcagggtgccggggcttcgggcgtgtccaagtccgcgctcgaagcggtgaaggccgccactacgatctcctccgccgaagccgatgtggccgcagccgcagctgcggccaagaagaccggcgaacagtccacgctgaccggagccttgaagatcgaggacgagccgtgcgtggtgatgatgagcgctaccggtttgattgcccgtaccacgccaagcgcgatggacgtgttcaatgcacgatccacttccgatgagcgtttgagagacgatcagatcaccacaatcttcgagacttccacgcgcgctacgtatgggctggtcacgtcggccggccgcctggtgctcgcgcatgtggttgatttgcctgccttgcccgctaccgccacattgtcgctgaagggaggagttcaggccgacgaactgatcggcatgaccgaatccaccgatccgattcgcggtgagcgtgtgattacggcgattgccatggagcagccgacgtccggcaagaccagtgccaaggacgagagcgaggatggcggggccgccgaggccaagccgttgccgtcgctggctatcggtacccgtaacggtgtcatcaagcgttggaatcgtgaggcacccaccaccatggattcttggcccgtcattgatctgaaagatggcgacgaagtggtattcgccgccgtggccgaggatgacgaccgtctggtgttcatctcctccgattcctcgctactgacctttgaggcgaagaacgtgcgcccgcagggtcgtactgcgggcggtatggccggcatcaagctggccgagggcgcccgtgtggcggccttcaacgtggttcccgccggcaaggtggcatggacctatgaagagggcgagaacggcttgacttccggatccggtgcagtggtgctcaccgtggccggcgattccgatgcactgcccggcaccgaaaacggcgcggcgaaggtcactccgctggaaatgtaccccaccaagggtcgcgctaccggcggcgtgcgttcccagcgattcctgaagggccagaacacgctgattcttgcctgggtgggcctctacccgttgcacgcctctacatccgcaggctctccggtcgagcttcccaagcccgatatgcgccgagacggttccggagtagacctcgcctcccccatcgccttcattgcgtaacctcaattaagctccctctgatgggccgagccgtaaagcaaacaccccagtggggtgtttgtaggcgaggagcgaacgatagtgagccaaacaatagagaagagaccctaaacccggcctacactaagcattaaggaggtggcgatgagactactggttgccgtatccaatgaaccgttggcccacgccattcatggtgccctgcttgccggtcgtcatgaggtgtctttggcaagcaccggtagtatcgcgctcgccgctgtcgccaaggagtcatttgacgcagtgattcttgatgaatccctgctcggcatttccaccgagcagctcatcgaatccctacgcaatgcccgtgcctccgtcaagattctgctgctgacttcgacgccactcagcaaaaccattggtgaaggcagccgctggcgagcgctgcctgacgagtacgcccctatcgaagagacgccctacagctccttcagcgcgaattcacgcgcaaacaactcagatgccgaagccgaacaacgctcggacaatgccgccgctagcgcacaagctaacgcacgacacccggatgtcgtgctgagcaaaccattctccgatggcgaactgctctcatacgtcggctcgcttgccaccgactcccccgccatgatcattcgtggcaatctcacgttggacaccacgaatcacaaggcctactacgcatccactcacagcgcaatctcactgtcccgtctggaatacagtttgcttgaagcgctggtcaaggctgatggccagttcgtcaacaccagcgagttggtcaaacttgtcggcggcccattcttcgagcaacaaggcttactcaagaacgccctctacacactggataagaagctcacccgcgccggcctcatcatgacccaacgcggctccaactaccgcattcgatagctgggctcaatcagtacagccgcatgccttggggaacgggggtgaagccggactggtggaggatgcgggcgaaggggtgacgggcgttgaggggttcgccattgatgtcgctgaatgtcacggagccggtgccattgcgtttgagggcgtaggccagttctgtggcggccttgcgcatttgttcgtcggaatcattgacagcggcttcatggctgaccgattgatcgaacgctgtcaggtgcttggctttggcggccgcgtatagtagcgcgccttgcgcattgagcacgaccgtggctccgatacggcgtgccggtttacccgcaccggcaggcgcgtccggccacgcgatggcggagccactgagatttgcggggtcgagcacactcaatgccaccacggactggccgcgatgctctgacggatgacgcaacgcatccacggtgtcgcgctcggcaaattgggccgcgccgaaaccacggacgaacatgcctcgtaccagtcgaccatgctcctccatgcgattcaataccggatacaacgctgagtagccacccgggatattttccttgtcaatcaccggctgcgcgatgacgccatacctgtccagcaacgtctcgaccagtgcgagtgcccgttcggtctggtcggtgtcttcggcttcagcttgcccgattacggcggaccacaaacctcctaacgtcatatccgtagtggctcggcgaatcggagcgacacgcccacgacgacgtgatgtagtggatttacgcgggcttgctgcgcctgcggttaatgcacgcaccggcgcgaagctggaattggtgaccttaccttgccagaccaagctccacaaggcatccttgaactgctgttcgctccactcttgcggaatgatttcgccggtgtttggattgatgtccggctccgcggtctcattccacgcacgtttggcggcatccatcagttgacgggcatggaacgctccccctgagtccagtgcggtcagaatcgcttccggcatggtggcgtctgaggcgttcgatgtcgtaccatgttccacaccgctgaacaaaattgaatccgccggatagaaagcaacctcaccggggtccatcgcactggttcccccggtttttgagccgacccagaccacatcgccgctggtcagcaactcatccagcaatgcaggttggtagtctcgtactcgtgcggggaatactgccgactcccagagtgcagtgggcagtgatatgccctccagctgctcgataacgcgcatgagcccgtcagcaccttcatatcgttcgccgccgaccggcccgataccttgtcggtcgataagaaacatctggaacgcctctggttctactggcttgactgctttacgcgccttggccaatgagcgagaccgaatacggcggaatacgtccttatggagccactgttggccttgctcgtcatcatctacaaagtggccttgcagcaactcgcctttggcagccagcacatccagagtgtgcacggcatccgtagcatcgaggtgtagatcggctatgagctgatcggcggtgaaaggaccatgggttttggcgtaacgggtcacgcgaccagtcacatcatcgtcggcaagctcattccagaaagtgtgctcccccagttcctgttcgacttcgcgaatcacgtccgggttgagcacttgtgccatatcggtggtgccgagcaagcgttcgagcacgtgcggatcgagagacagcagttgcgcgctacgctcggcctgaggttggtcatactggtacatcaccacgccgacgaagccaaagagaatgttctcggcgaaaggcgatggcgactcggtttccacgtccttcacggtaatggtgccggcttgcaatccggtcatcacctcgttcagggcgggcatgtcatacacgtcctgcaaacattcacgtgcagtctccaacagaagcggaaagttcttgaccacgcgagccgattgcaggagctgtgcggctcgcaatcgctgctgccataggggtacgcgacggcctggatcggaacgaggcatgaacaacgaccgagcggcgcactcacggaatcgagccgcgaataatacggattcgcccacctgacgttctacatccgtttgaagatcctcggaatcgaaaaggaacagatcctgagcgggaatatgcccgtcgccatccggcagctggatgacgatgccatcatcagcggcatatacctgcccgtcaaaaccataacgctggcgcagcctgcgactgatggccatggaccacggttcatgaacacggcggccgaatggactcagcagtacgatgcgccaaccgccgtcttcatctcgcgtgcgctccacaacgagggtttggtcgctgggaaccgtaccagtggcggcttgttgttcggagagcaggcgggccaagttggtgatggcgttgacatctaggccgtcgtggtggagacgggtgaggattgttgggatgaaggttgggacagctggaccttctgcggcagacctcccctcagtccgcttcacgtctaatccggcggcgatttctcgggtgaagcgggctatggtacggctgaaaccgtagtcacggccagcgccttcaccgtgccagaacggcagacgggcggtgcggcccggagccggagtcacgaccacacgatcacgggtgatttcctgaatctgccatgtggaggtgccgagcgtaatgacatcgcccacgcgcgattcgtagaccatctcctcatccaactcgccgacgcgacgctggcctttgccggcgtccgcctcaggcaggaccacggtgtacagccctcgatcgggaatcgtaccgccagaggtaacggccactttctgcgaaccgggacgggcggaaatcaggccattatcccgattccataccagtcgcggccggaaggccgagaattcctcgctgttgtattcgccggacatcatgccgattaccgcatcgaacatgtcacgtggcagttcggcaaacggcgcagcacggcgcaccgtggcataccagtcatcagcgttcaaatcgtgcatcgcggcagcggccacggtctgctgggcaagaatatcgagcggattgcgcggcacggccaatggttctatatcgccggcaatcatggcttccagacttgcggtcccagtgacaatctgctgacgggtgagcgggtagaacaatgcgtgagagacgccaccgacctgatgatcggcacggcctacacgctgcaatccggaggagaccgacaacggcgtatcgacttgaatcaccaagtcgaccgagcccatatcaatgccgagctccaaactggaggtggccaccacgcagcgcaattcaccacgtttaagccgttcctcaatcattttgcggcgatctttggaaaccgacccatgatgagccatggcgatgacatcatcgccctcatgtgagccgacaagcatggtggtggagccgaccacagcatcgtaatgcgtggagaaccctccgcggccttccggagagcccggatcccgcacagtgtcgggattggtgccatgccgggtctgcgcatacagatcgttcaagcgcgcggtaagcttttcggccacaccacgcgaattaacgaacaccaatgtagtgcggtgcgcgagaatctcatccaaaatactgcgttccaccacgggccaaatggaaccggaggtacggtcgcccgccgctccaaccaacgcggaggaatcgaacgcatcactcgcatcagaatcgtccccagaagtggaagaaacatctctatcatccaccggcacaatgcccctgcgttcagcaagtcgctgcatggccggcgtgacaccactgatatgcggagcggaccgttcagcatccacgccaccgacacgctgcttggcattcacggactgcaaatcacgcatgttttccaacggctcaatcatgcgcaaatccattgcaggccgcccaccgggattcacgatggtaaccggttgcccgccgcccaggaatcgcgccgccttttcaggcggattcaccgtagcggatagaccgatgcgctgcatatgacgatcgccgcggccagcatcaacggcggcatcaccgccctcatcagcatctgcatcgattgcatctcgcttgcgcgattctgcgacaaggttctccagccgttccagacttaccgccaaatgtgcgccgcgcttggtgcccgccactgcatgaatctcatcgacgatcaccgtatcgacagtgccgagaatccgccctgccttcgaagtgagcaacaaatacaacgattctggcgtggtaacgaggatatccggtggatgggaggctatgcgccgccgctcctgtgcggtggtgtcgcctgaacgagtggcgaccgcgatcttcggtacgggcagcccttgcgcctcgcattgtgcagcaatgccctccaaaggctgttctaggttcttggccacatcggccgcgagcgcctttaacggcgagatatacagcacacgcacaccggcacgccgcgtgcgtggcacggtcatcaatcggtcgatggctgagagaaacgcagccaatgttttgccggaaccggtaggggcgatgaccaagacattgcgaccggaatggattgccggccatgtctgagcctgtgcctcggtcggctgaccgaaggcatgctcgaaccacatcttggtgggttcggaaaacaggctcaggctttcgtacatatgtacgattataggtcagctgaagtaggcgatgacttcttcggcggtaccgtaggcactttgggcaccgagcttggtggccgcataggcggagacgtaggagccgatttgcgcggattgcagcagcgtatgaccggcggccaagccagccagcacggtccccatgaacgagtcgccgcaaccggtggtgtccactccattgacttgcgcggcggatacgcgatgccaacgtccgttctcgatcaccaccgatcccgacgcaccaagcgtcgctatcgcccggtcgaatccgtaatcggtgaatcgttcggcgacctcgtaccagtcgagtgattccacgtcatcatccggcaggcccagcagttgagccacttcatgctggttgaccagcagaatatccgtggcttccaccagttcgtgaggcagctcgtccataaatggcgagtcgttgagcagcacggtcacgccagcgtcatgcgcggtctgcgcggcggcgataacggtggcaatcgggctctccagacacagtcccaataccgcgcattcggcgatggtcgtgcgatgtgattgcacatagccggcacttgccttggcattggaacccggcgaatagacgatggtgttctcgccctcagcgctcacggtgattaccgtggcgccgctggggccttcgacatgcaggatatcggcggtgtcgacgccggcctcatccagcttgcttaataggaagtccgcgttggagtcctcgcccaccgcgcccagcaactggacattgacaccgagacgagcggcggcagatgcctgattcgcgcccttgccgcccggcagcactttcatggcaccaccattgacggtttcacctggcttgggtagtcgtttagtggttacggtgtaatcggcgttcatcgagccgaccacgattaccgagcccggcgcatccttcagcgcttccaatcgttcccgtacgggctcgggcatctgttcatgttcttcttcacttatcaccatgggctccaagcatagtaggcggcgggcccagatgcgcatatgatcagccgcgcaacttgcgaagacgctcgtgcatggccaccatcagcaccaagagcaccagcaaataccacgggtagagactgattgtcacatattgcgcgatgatgccgaacagtggcggcatgagcagtgagcccacataggcgcaggccatctgcacgccgacgatggcctgcgatttgtcttcgccgaagtaggccggcgtcgagtggatgacgcacggataaatcggcgcgcacccgaggccgatgaccaccagcccaacgaccacgccaaggtggtgaggcaatggcacgaacatggtgaggatgccggcgaacaccagcacttggccgaggcgaatcatgaccgggtccttgaatcgcatggtcaggaagccggaaagcgcacgacccacggtgatgcctacgtagaataggctggcccagctggcggcggtgatcttgtcgatgccgctgtgcatcaccatatagctggaggcccacagacccgccgtggattcgacggcgcagtagcagaagaacatcacgaggatttccttggcaccgcgaatggcgagcacgccggccacgccgagcggtttgcgttcagcaacagacaccccttcagcagtgccaaatctctcggcattgccgtcagatgatgcggtgtcatcggtcgattcgccgaccgcaattgcgccacgtttcttccacagtggcaggctcagcaccaggatgacggtcagcatcacctgcaggatcgcgatgtaccgatagccccacggccagccttggccttgagagagcgcatagcccatgatgtaggggccgaccgatgcgccgacgccccacatgcagtgcagccagctcatatgccggctttcgtagtgaatggctacgtagttattgagcgccgcatccactccgcccgcgccaaggccgtatggtatggcgatggccaacagcacccagtaattcggggcaacggagaaaccggccaaggccgccgcagtcaacgccaccgaaacggcggtgaccttgcctgccccgaatttcaatgtcattcggtccgaaagcagtgccgagacgattgtgaacatggaaatcaccgtggagatgccgccggcccacgccaccggcacgttcagatcctggctcatggtgggccatgcggatccgagtagcgaatccggcaatcccagactgataaacgccacatagatgacggcaagcaacagactggccatgttccatctcccattcacagtacggcaccggttgtgataacgatgtcatcagtctatcgaatagcgcttcagcaacacgcaaacatcacagtttggagtcttgcccgcagtacaccggcgtggaatcggctacgccgcgcgggtcaaagccgatgatgtcgtagttgtccttgaaataatcggcggcggtgcactcgatgaaatcctgatgatataccgcagcaccctctgacgaaatagctgtccgccaaagacggactgaggggagagaaatacgagtagcccgctaccacccgaggcctctcccccagtcagcttcgccgacagcccctcatcagagggagcttgagataggacggtcaggtatcgatcttggagcggtcgaaatcgtcggcgttgtcgacgatgaactgcttgcgcggaggcacgtcgtcgcccatcagcaggctgaaaatctcagatgcctgggcggcgtcctccatgcggatgcggcgcagcatacgcgtgcgcggatccatggtggtgtccgccaactggtcggcgtccatctcgcccagacccttgtatcgctggatgtcgtcgttgtatccgatgtgcttcttgtcgaggtcggccagcttgccggccagctcgtcatcggaatacgtgtagatgtattcgcccttgtgcgagccggtcaacgcgatgcggtgcagcggcggcactgcggcatacacgtagccgtgttcgataagcggccgcatgtaccggtagaacagcgtcagcaacaggatacggatatgagcaccatccacatcggcatcggtcatcatgatgatcttgcggtagcgagactgttcgatgtcgaagctctggccggagccggcgcccaccacttgaataatggccgcgcattccttgttggagagcatctgcgtaatcgacgccttctgcacgttcaggatcttgcctcgaatcggcagcagcgcttggaaaccggcgttgcgtgcggccttggcggtaccgagtgcggaatcaccctcgacgatgaacagttcggccacgtcgtcattgcccggctggcagtcggagagtttggccggcatcgaggcggattcgagcgcgttcttgcggcgcgtgacctccttggccttgcgcgactggatgcgtgcgtgcatttcgccgacgatcttctccagcacgcggccggattgttccttgtacccgcgcttggagccggtgatcatctcgccgaattgcttgtcggtgagccgggtgacgatcggcttgacctgcgcggtgccgagcacatccttggtctggccttggaactgaggttcggccacgcgtgcggtgaccacggccacgagtccggcttggatatcgtcgcgctccaccttcatggcggagtccttcatgttcaccttgagcttgcgggcgttgtcttccaccgccttgcgaatctgcttggtgatggcgttcatgaaaccgtccacgtgagtaccgccgccgggcgtctccacgatgttcacgaagctcatgattgtggtgtcatagccgttgacccatcgcagggcgatgtccacgccgcaggtgcgttcgatttcctgggcgtgcagttcgccgttctcacccacggcctgggtctcctccttataggtgccctcgccttggatgcgccagatgtcggagatcggctcgcctttggacaggaagtcgacgaagtccttgacgccgcctgtgtgcaggaattccacgacgcgcgggtgcgcgggctgttcgccgaacgcgccatcgacgacctggtcgccggccgtcagcgagaagtcctcctcggccgggctctcggcatcgtcggactgggattcggcggagtcgtcgaagagttcggcatcgttggacgagacatccaaggccggtgcctggtcttgcgcaggttcgactgttgtgtcatcagtggcctcgacggtgtcagtcgccgccgtttccggtacgttttcgtcgatgatggtgattttgaggccgggcaccaggaagctggtctgacgcacgcggtcgatgagctgttcgtatgagaactcggcggttttgttgaagatctccggatcataccagtaacgaatacgggtaccagtggttttgggagataccttgccgatgatttccagctcggtgggtcggttcttgcgagtgcgcttgaacggggaatcgggagacggattggccgggtcggcatccgtgtatacgccagggtgaccttggtggaaggtcatgtggtgcgtcttgccgtcacgatccacttcgacgtccagtcgggagctcagggcattgaccacggaggagcccacgccgtgcaggccaccgacggcgttataagacgagttgccgaacttggcaccggcatgcagtttggtcagcacgacctccacgccggacaggccggttttcggttccttgtccaccgggatgcctcggccattgtccgcgacttccacggaaccatcggtgtgcagggtgaccacaatgtcattgcagaagccggccaaggcctcgtccacggagttgtcgatgatttcccacaggcagtgcataagaccctgcgagtcggtggtgccgatgtacatgcccggacgcttgcgtaccgcatccaagccctcaagaacagctaggtccttggcgccgtattcttctttgggcatacagtcctatttttctcttcaaatgcttggctcccctcacagaggggagccagatgatcattgatccaggaagtcgcgcagggtctgcgaacgggacgggtggcgcagcttggacatggtcttggactcgatctgacggatgcgttcacgggtcacgccatacacacggccgatgtcgtccagcgtcttcggctggccgtcttccaggccatagcgcatcttgatgacgccggcctcacgcggagacagggtttccagcacctgcttgaactgttcctgcaacagggagaaggccacggcgtcggacggagcgatggcgtcggtatcctcaatgaggtcaccgaactcggaatcgccatcctcgccaagcggggtgtgcagggaaatcggctcgcggccgtacttctgcacttcctgcaccttctcaaccggcatatccagctcgcgggccagctcgtccggcgtaggttcacgccccagatcctgcagcatctggcgctgtacacgggacagcttgttaatcacttcaaccatgtgcacaggcacgcgaatggtgcgggcctgatcggccatagcacgggtgatggcctgacgaatccaccacgtggcgtaggtggagaacttgaagcccttcttccagtcgaacttctcgacggcacgaatcagaccaaggttgccttcctggatcaaatcaaggaagagcatgccgcgacccgtgtagcgcttggcgagcgagaccacaagtcgcaggttggcttccagcagatggtccttagccttcttgccgtcggcggcggcccacttgagttcacgcttgcgcttgaactccatgccttcgctttcggtgtcgagcaggtgctgggcgtacaggccggcctcgatgcgctcggacaggtcgacttcctgctcggcgttcagcaggctcacgcggccgatctgcttcaggtagtccttgaccgggtcggcggttgcgccggccgcaatcacacgacgcttcggattgcccgaggggatgatgttctcttcctcatcatccgtgtcggagaccacgtaggcacccttttccttgggctgctcgggtgccttggacttggcttcttcctcgtcctcgtcgtcttccacatcgtcgtcgtcggcatcgtcctcatcgaggtcttcgtcgtcggcatcgtcttcgtcaacgtcgtcaagatcctcgtcgaggtcgtcaacgtccaaatcgtcgtcgttgacctcggcatcgtcatcaagctcgtcatcgacctgagtgtcctcgtctttgacgagctcatcgtccttggccttcttcgcggttttcttcgcggcagacttgcgcgtggtctttttcgagggctctgcggacttggacttcttggcggaagtcttgcgtgcggtggtcgtagagctggccttcttcttggtctcggtctcctcgctggactcggctgtctgcttggttgccgtcgtttccttcgtggccaaaactgctccttctgatctctcgccgtgaagtgcatataccacatgggcccacttctggcaagggcaaatcgtcaactatgtgagtaaaccaccctccacggacgattattcccacatcgttgcccgacgtgttgccgatcaccacacgctttccttccgcgcatcgcgcgtaaaacctcggaaatccgccgtttctgttcactcagcccgagcaccatgccggtgccacgcctcgatcggcggctgagaatatcatcgccgccagcgaacaatcctcatcgagcagcaggcatcgcaaggcgaacaccattgctcgcggatcgcccagccaccataaggtgtaggcgattacggccaatggctgtatgcagtacggcaccggtgaggcttcggcgatatcgagcaacataccgatgccggtatggcaacgctccttatccggcatcatgccttcatcctcgaatgcgcaggtcagcagctcgcccattcgtgttctcgtacgtgccagatgcggtcgcgccgcgaattccatgagccatgacttggggcaacggctttcatcaataaccaacgagagaatcagcgcatcacgaatcgataaggtctcgcgcatgcccaccgcaaacgcggccatcgtctctcggcctaggtcggtgttcccggcatcgaggcaagacagccattcgtccaatggttcggccacccagtcggcattagcctgttgcgcgcctcgaagtcggcgatcattgcgaaattcctgtgatctcgtctccaactcgtcaaagacaaagggctccgtctgctcggcggcgtgccgtttggcgtgtcggttcttacgcggcttgtgtggcgtgttgttgttcatcatgtcctccttgactaatggtgtgcaatctattggtgttgtggtgcgcgctgagccaggtagctcacgcaccgagtgggtgtgcccactatggctgaaaacgccgtatgacgcaggaaaaaacgaccattgtggttctagcttcaaaacccttgatttccaacgttcttgtgttcttcaaaccctgtggataagttattaggcatgtgcacaactgctaacaaccgcgaaatcatcgagccacgcatcattcagttggtgcgggaactgactgccgcccccgccaccgacgaggttgccgacgccctgaaaccggtgatggaacaggttgtggaccaagccgcctcctccagccaaggaggcaaacgactgcgtgcgctgctcgcattggacgccttcgatattcttaccggcgacgtgactcctgattggcgtgacgccatgatcgacctagcctgcgccattgaagtgtttcagacggccgcactggtgcatgacgacatcatcgacgaatccgatctgcgccggggcaagccttccgcacatcatgccttggagcaggccgtacacagcggtgccataggccgtggcttgggcctgatgctcggcgacattctggccactgcctgcattgaaatcacacgccggtccgccagccgtcttcccaacaccgatgccctgaacgaggcgtttcttaccatgcagcgcgaggtggaaatcggccaggtactggacttggccgtcgagatgaccccgctgtctaatcccgaagctctggcgaacgcctcattgaacgtattccgctggaagacagccagttacaccaccatcgctccactgctgcttgcactgctggccgcaggagagagcccggatcaggccagacattgcgcgttggccgtcggccggccgctcggactggcgttccaactggcggatgacctgttggatgtcgtcggatcaagccgcaataccggaaaaccaattggcggagacatccgagaaggcaaacgcacagtgctgttggctgatgctctgtctgcggcagatacggcggataaggccgatctgattgccatcttcgaagcggattgtcgcaatgacaaccaggtggcccgcaccattgaactgttcacgtcgaccggtgctcttgatcgatcccgcgagcgcatcgctgccctatggggtgagtcccgtaaggcgattgccggtcttgagctgaattccgaagcgcaacgccgtctgaccgaggcttgtgcgcgattcatccccgaatccttgcgatagtccgcaatgcgagccgccggaccatgagaccatggacaccggtgaaaacccgtgaaaactatgcgctgatgctccggccgcgtaaccggggccatgtacactgaacgtgtttagtcgtgattaaaggaaccgtacgatacaacatgagtgagaacgagcccgtgcagatgattgagggacgctaccgcatcgtgcgcaatatcgccgagggtggtatggccaccgtgtatgaggccgtcgatgagcgtctggggcgcaccgtggcgattaaggtcatgcacacacaactcgccaaaggcccgcatcgggagcagttcgtcgaacggttccgccgcgaggccaattcggccgcgtccatcgccaacccgcacatcgttcaggtgtatgacaccggcgagttcaatggacttgattttctggtcatggaatatgtgcatggcgtcaatctgcggcatgagatgaacgcccaaggcacattctccgtgcgtgagacgctgcgcgtggtcgcggagacgctggatggtctggcttccgcgcatcgcgccggcgtggtccaccgtgacatcaagcccgagaacattttgatcaatgatcgcggccatgtgcagatcactgatttcggtctggccaaggccgccagccaggccacattgagctccaccggcatgctattgggcaccgccgcttatctggctcccgaaatgatcgagaacaatcaggccaccgcgcaaggcgacctgtattcggtgggcatcatggcatgggagatgctgaccggcaaggtgccgttcgattcggataatccggtgacgcttgtcttcaagcatgttcatgaggacgtgccgtccgtggccacggtctgccagggcattgatccgtccgtggcggcgttcatcgcccatctgaccgcgcgtcaggtggatgcccgccccgccgatggcgcggcagcagctgaggaattgagccagttggccgccaaattgccgctggaggcgtggcaataccgtttgcatgccgaacccatcggaggcgatcataccgatgccaccgctgcagcattggtaggcaatattgccgagcaggccccgctgaccggtgtacctgccggtgcagcaacgttcgagccgtccgtaccggcatttttggtcgatgatgccgcaagcaataccgccgataccggtggcgccgcagacgtcaatcctccggcgcctccggtcgcccccaccacggcacttgattcgtcgatgttagccgatgcttcggctccccataagacgcagatcatggcacagtccggcagcgagacacaagtgctgcctcaggccggcgatgccttcacccgagcgcttgccctttccgatgagccggacgtcgcttccaatggcaccgggtcaaagaagcagcgcagcaaaaaaccgctcatcatcgtactggtgatcgtgctggtactggctgcaatcggcggaaccgccggctggtggtggtttgccggaccgggaagctattggagtgtgcccaagccggatgacgtgacctgcgatgcgaatgcaggcaccgaatgttcgctggccggcgcggattgggccacgtatgaaagcacgttgaaggctctcggcatcccctacaagacgcacaaggaatacagcgacgacgtggcggaaggcaagatcatctcttcttccgtgaacaagaccaaggccgttgtgaacagccacataagcaagcgagccaatcaggagcttacggtggtggtgtccaagggcgtgaggatggccaccatcccgaaggatattctcgacgcggattcggccaatggcaaagacccgttgaacgcgctcaagaggtctggcttcgataatgtcaagcacgacgagtcgaaggacgagtattcgatggacacgccgcagggtgtggcgttgacgatctcccctgatcccggtaccgcagccaagcacaacgatgaggtgacggttactttgagcaagggaccgatgccggtgaccatgcctaacatcgtcggtaagacccaggatgagatgcaagccgcgctcggcgagttgaagctcacggccaatgtcaccgaacagtacgatgacaaggtcgaggctggccaagtcatttccgcgtctcaggaagccggagcccagttgaagtggggcgatagcgtggacgtggtgatttccaagggtccggagatggcgacgataccgtccggccttgtcggcaaacaggaaagcgccgtgaccaagacgcttgaggctctcgggttcgaggtgaaaaccgacaaggtgctcggtgggctgttcggcacggtacgtaccgtgaaaagcggggatacggatctatccaacggcggcaagattcgcctgcgcgatgccaacggcaaccccaccgtcatcaccctcgccatcgtgtgagagtaatcaactggctcccctcgctgaggggagccaacacatattattcggcttcttcggcggcctgttgggccttgagctcggccttgaccttctgggcgtattcgttcacgaattcctgaccgctcattttctggattgcggtggaaacacgatcggtcagcgaacgcaaatcatcatgtgtaatctcattggccggcttcttggcaacctcaatcggcttgccatacagcaccttggtcttgcccttcttgggaatcgacgtgccaatcggctgcagcttgtccgagccgatgatggcggtcggaacaatcgggcaaccggtctcgagcgcaagtcgtgcggcaccggtgtgtcccttgtacagtcgaccgtctgggctgcgcgtgccttcaatgtggataccgaacaggtgcccatcctcgataatctcgcgtgcgtgctcgagtgcgccaagcgacttgctgccaccggaacgatcaaccgggaacacgcccacggacgtgaaccaccacttcttgaacttgcccttcaatcccttgccctcgaagtattcggctttgcccatgaagtgcaccatgcgcgggcaggtaatcggaatcaaagcatcatcgatcaccgccagatggttggctgcgataatcgcgccgccctctcgaggcacgttattcagtccgctgacagcagggctcaaacgatgatgagcaatagggccgagacctttgacgaagaaccagtagagcacttggcattcctcccgcagacgaactagccattggccggtcgcctgattagagtgacagttatgactgagaaccagaatagcaatgccgacggagagcggccaacccccacgccgggcaacggacaggattccggtacttcatccaagtcgtcgactcccggtgccgccggacaagccacgaatggtgccgatacaccgcaatcgtatgacgcgaacgatttggatgcggcgtgggccgcgttcgaagccgagcatcaggccgacttgcatgacgtggcttcctccaggcaggccaaaaagttcgagaagcaggccaagaaacgcgagaaggaggcgctgctttccgtagatgacttggatatcggctcgttcaccgatgatgctcgcccgagccgtggcggcaagaaaggcaagcagtcaggtccccgtgatttcaccggctccagctggctggataccgataatgtgatggacgcctatgatgatggcggcttcactcccccgaaccctgatcttggtccggtcaaagcgtctacggtactgctgacggcgttgcttatcattggtctcgtaggcgaagcggtgatgatattcgtccccggcttgaacgcgattcctctcttgggcgcgctgctcaatattctcttcgggctgggcgtcattttgggcttgggtggattggtggccaaaatcctcaaccgcaaagaccgccccggtgatcagggcggctattacgacgacggcgcgagggtgtagctcgcgtaggctgtgtggttcttggctcccctctctgaggctgagccgttaagcgaacagcccagtgggctgtttgtaggcgaggtgtgagagatagcgaaccaatgtattgcgggcgtggctcgtccgtaattgcggccgagccacgataggtcacgaattgaagtcgatggactcctgtaactcggcaatcatggccttgatgcgggcgtcgcctccccaccagttgagacggatcgtcacgtcccctttggccggcacaaccggcacatcagcggcaccaaccgaagtgccgcacgccgcagtcacgcacaaggccgcggccgccataacagccgccatatagacacataagcccccctcatcagaggaggctgagtacggtgtatcacgccttggacttggcggtttcgatccacttgtcgaacagggcttcggccttgccggaatcgacggtttcctcggccagcttgtaggcttcggcgaaacgctcggccagtgtgccgttgccgaccagattgccgtcggccacgatggcggaggcggcgttgagcagtgcggtggtgcgggacggaatgtccttgccagccaggaagtccttgaatgcgttggcgttgacgtccggaacgccgcccttgagctgttcgacggtaatcttggccaagcccagatccacagtcggatcgaactcggactcggtaaccttgccgtcgcgaatctcccagacggaaaccgggccggtgggggcaagttcgtccatgccctcgtgggaggtgtagaccaagccagactgtccacggctggcgtacacggctgccataatcgggctcaccttgcggttggcgcagccgatggccacgtgtgccgggttggcggggttggtcaacggccccaggatgttgaagacgcacgggatgcccagcgcggcgcgaatcggccccacgaaacgcatggccgggtggaaagtgcgggcgaacgcgaaggtgatgcccacctcgtcgcccacttcgccgacggcttccggcttcagatccagcggcaggccaagggcttcgagcacatcggcggcaccgcacttcgaagatgcagcgcggttgccgtgcttgacgatcttcacgccggctgcggcggcggccacggagcccatggtggacaggttcacggtggcgaagccgtcaccaccggtgcccacgatgtcggtggtcccaccggaaacgttcagcggcacggcgtgggagaccatggccttggcggcaccacgcacctcgtcggcggtcagccccagctgctcctgcatggcgagcgcggcacccactgcggcggggttcgcgttgccctgcatcaggtcgtccacgaaccactccgattcctcagcagtaaggtggtctcccccgaccagcttggtgagaatcgacttccatgtgatctcggccatgatgccctccttggcgtttcctacgccgtgtgatatatgttcgccgctcattgtaatggtttgtcgtttcaaggccctgaatcttccatatcgcaaaatatgagtcagctcccgccagcgggagccaacctattttttcgccaatcagccgtctgcaaccggctggtcagcagtatcagtcgctaatcagatccaccgtatcactcggcggtctgcggccagcacttctcgtacttgatgccggtgagctgctcgacgatcttcttggtctccggctcaacgtcagccttcttgccgccggccttgaacgcctcttcgacgaaaccgttggcaccgaggtaccagccccaagccatggcggacaagccagcggtgatcttgcgggcgaactgctggaagccgatgtacaggccaccgcggttttcgccagccatgatcatgtcgacgtccgggatgaacgggaacacgttccacggaatgaaccaggtcatagcacggaagatcagccaccagaccatgaccacgtacagcatggcgttccacacggcggtgttgttctgggcagcagtctgtcacaggccccacagaccaagcagaccgatgatggcgccggcaaagttcagggagaacatcttgcgcgggccaagctcggcgaaaatccagccgaacacgggcttgagcggttcggcttcaagggcagcctcgtagaaaccggcctcttcaggagtcagttcccacgtggacttgtacgcgatgaacacgaacacggcgaacagcacgatgaagaagcccatggaaatcgtgtaggacgagctcttcttgtcaccgagagcattgaggaatgcggccatgcccaacggaatcacggcggtggaaataccggagaacagcattcgggtggtggacagcatggtgcggccgttgaagtcggtggtcatctcgttcgggagcgccgaatacggggtcataatcagctggttggcgataatccacagtgcgtacaccaggaagtacgcccacaccggcatgcccggcacgaacataaggatggtgaccagcaacgtaggcacacccagcagaatcaggaaacggcggcggccggctatgtggaggatctgacccgccgcggtaccatcgacccgtatttcgaccagcctatctacgacgtgtatgccaagtccgccgcccgcgtgaaccgcgattgggacaacctgccgttctacagccagctcgacgccgaattcacacgcctcatcattcccacactgcgccccggcggccacagcgccgacctcctacccgaatgggaggcacgcctcaagcgctacgccgcatcccaaggcttcacagtgaattaggtcggcggcggtattccgtttccggtacatcgcatgccgtcccgcgcgtacggcaccgcacgaatacatgccgatgaaccgcacaaaaaatggctccccgtgtggggagccatgagctagttactaactagcgatgcgtcacttctcgttctgaccgtggcacatcttgtacttgcggccggaaccgcacgggcacggggcgttcttgccagtgccagggaaggtgcggccgtcggcccacggcgtcttgagctcttcgctcttcggacgcttggaaaccgggaccttgccttcggcgtggctgatcggagccgggccggcaacgggcagcgtggactcgccggcctcggaggcggctgcggattcggcgatcgcctgcttggcgtccgtatcctcgtcctcttcctcgacttcgccctcggcggcctcgaccacggattcgccgttctcgtcggggccggaggccacggcgatggtgtcggcgctttcggcggtctcctcgacctcgtcaacggcctcgtcggtggtggcgacctgcttgatgtcgatgtggaacagcagctggacggtctcctccttaatggcctcgatcatggagttgtacatctggtagccttcgcgctggtattcgaccagcgggtcgcgctggcccatgccacgcaggccgatgccgtccttgaggtaatccatctcgtaaaggtgctcgcgccacttgcggtcgagcacggcgagcaccacgcggcgttcgagatcgcgcaagccggtctcgccgatggtctcctccatttcgccgtactgctgcctggcgtcctcgacgatcaggtcgcgtacggcctcgacggccttcgcacccttgaggccgccgacgatcttcctgacctcgtcttcgtcgaccttggtggggatcacggtgttgagcgccttgaacaggccctcccaatcccagtccttcggtttctcggatcccttgttggcgcccttgatgtaggactcgacggtgtcggaaatgaaacgcaggatgtccttgtggatgtcttcgcccttgagcacggcctgacgctcggagtagatgacggtgcgctgcttgttcatcacgtcgtcgtacttcagcacgttcttgcgaatctcatagttacgggattcgacggccttctgcgcggtgcgcacgcccttggtgacggacttggcctcgatcggctggccttcttccatgcccttggccatgacctgggccaccagctgggtgttgaacagacgcatcagatcgtcttccagcgacagatagaagcgggactcgcccggatcgccctgacggccggaacgaccgcgcagctggttgtcgattcgacgggactcgtggcgttcggtgccgagcacatacaggccgcccagctccttgacttcctcgtgctcgtccttgacctgggccttgatctcgttcagggtgcccggccaacgcttctcgtactcttccggggtgtcttccggagagtagccttcggacttgagcttggcgtcggcaaggaactcgacgttgccgccgagcatgatgtcggtaccacggccggccatgttggtggccacggtgacggcgcccttgcggccggcgacggcgaccacggcggcttccttctcatgctgcttggcgttcaggacctgatgagggatcttggccacgtcgagcagagtggagaccacttcggagctttccacggaagcggtaccgagcagcaccggctgtcccttggcgtgacgcttggccacgtccttgacgatggcggccagcttctccttcttggtgcggtagatgaggtcgtcctggtccttgcggatcatcggcttgttggtcttgatcggcagcacgcccagcttgtaggtgttcatgaactcggcggcctcggtttcggccgtaccggtcatgcccgcgagcttgtcgtacatacggaagtagttctgcagggtgatggtggcgaaggtctggttctcggccttgacctccacgccttccttggcttcgatggcctgatgcagaccctcgttgtagcggcggcccggcaggatacggccggtgtgctcgtcgacgatgagcacctcgccctgggtgacgacgtagtccttgtcacgcaggaacagttccttggccttgatggcgttgttgaggtagccgatcagggcggtgttggccggctcatacaggttgtcgatgccgaggaagtcctcgaccttggtgatgcccgggtccaggatgccgacgaccttcttcttctcgtcgacgtcgtagtcctcgtcgcgggtgagcttcagcaccagcttggcgaactgacggtaccagcgggtcacgtcgccttcggccgggccggagatgataagcggggtacgggcctcatcgatgaggatggaatcgacctcatcgacgatggcgtagtggtgaccgcgctgcacgaggtcggccttctcccatgccatgttgtcacgcaggtagtcgaagccgaactcgttgttggtgccgtaggtgatgtcagcgttgtactgcttgcggcgctccggcggcttctgctcggtgatgatgcagccgacgttcatgccgaggaaacggtagatacggcccatcagctcgctctggtagctggcgaggtagtcgttgacggtgaccacgtgcacgcccttgccttcgagagcgttcagataggtgggcagggtggcgaccagggtcttgccttcaccggtcttcatttcggcgatgttgccccagtgcagggcagcaccgcccatgagctgcacgtcgaagtgacgctggccaagggtgcgcttggagacctcgcgcacggtggcgaacgcctcgggcatgatctcgtccaggctcttgccgttttcgatttcctgcttgaacttcggggtttgggccttcagatcctcgtcagagagggcggagatctcgtcctcaagagcgttcacggccttggccacgttctccagcttcttgagctggtggccttcacccattcgcagggctttgtcaataatatcgaccactgggttctcccttgactgataagtggtggtgtccgcgtatcaggatagcgcctcacaccgtcagcagtcgaatttttcgacctttttacgaaaaaatggaccgcctccatattggaagcggtccatgcggtatcagctgatcgtgtcagcaggccttaccttcaggctttcttgacattctccggagtgtcgatttcgaacacgccgtagctccaaccgtgacggtggtagacgacggacgggcgtccggtctccttgttcacgaacaggaagaagtcgtgtccgatcagttccatctcgtacagcgcctcgtcgatgctcataggctcggcgatgtgcagcttgcgacggatgacaatcggcgtatccccaacctggacctccacggattcgccagggccaagatcggaggcgaccgcagcctgcgggctgttgttcggctcttcctccgacacctccggctcgggctccggggcgataacacccagatccaccgggaccgggttcgcgtaaccacgacggtgatccttgcgacggtcacgagtacgacgcagacgcagcgtcaacttatccagcgccatgtccagcgcgctgaattcatcggtgctggaagcctccgcacgcaccacggtacgtccggcgataacggtgatttccacgcgcttggcggtatcggcctgacgcgggttgccctcatgggtcagcacgatctgcgcgcgctgagcatccggggcgatagcggtcacacgattcatcttggtctcgaccacatcacggaacctttgcttgacctgcgtgtggcgtccggtaacgacgatttccatgttgacctcctctaactcaagcggtgtaacccgctatatgtgttccgaacggcatcatcaccgaccgggtatgtttcattgtagacgaacaatgggtgaacggccggaaactcgcccagagaatatatgtttattcccgggcttttctctgcaatgaaacgatgtatatactggggctttggcagcagtctcctataagaagatttgataccggtttatcaggctggctcgtttgttcgtcatggtaaatactgcaatggataggcagcgttttcttgctctttctcgcacataccaagctcttacagatttgattcgtctccatacgacacgccacaacacgcccgacacgccccatccgatattcggcgcgtcgttcacgaatcgcccaactatgcccaaccatggagaaaacaggataaccgggcaacgtcatggcctcaccgcagggcgggatgccgccttttccgcaccttatgtataattgcaggcttgagacctcttgatggccgcggccgtgatcttcattgggatcggctgaggaacttccgggctccatagagcacgatggcggataacgtccgcccagggtgacctgagagatagcgcaacagagaacagaccgcccgtcctcgacgggtaagggtgaaacggcggtgtaagagaccaccgggcctctggtaacagtaggtcgcatggcaagcctcatcgggagcaaggccaagcagatggcggtaagggctgctcgcccgtgtcatcgggtaggctgctagagcctggcggcaacgtcaggtcgagatggatggccatccgtgccgtgcgttcgcgcacggcacgacagaacccggggtataagaggtctcattttttttcttggctacaccaacaattcggcggcgactcggcggagggtttcggggctgtgtcctttgcggccgcctgcggaccaaaaccgacgctgacggacctgacgatcgaggccatgggttttgcgggctatttggcggcccaattcccatgcggcatcttcaaagatgccattttgctcagcttcgccacacacctgttcagccagtttgcggtccacgcctttgcgagcaagttccaggaccgcaccacgacgacccatcatgcgaccggcacaatagcgtacggccgattcggcataagcgcggtcgtcaatcagttgcacgcgaatcagccgttcgatgacctcgtccacaatcgcctcgccatagcctttgctgagcaatcgttcgcgcaacgcgccggatgcacgtggggccgcgtccagcaaacgcaatgcagcctcgcggcaagcgtccaaatcattgggatcttcgacaacggcagcgtctctcccccgtcgagaaaaacgtcccggcggtttcgactgaacacgctgctcggcaatgggcatgtcttgcgacgcaacaggattgcgccgcaagaatgcttcggcactaatcatgttcaggccttagctgcgccggccttggcacgggtcgttttggcagcaggcgccgctgcggccttgctgtccttggccacgtcggcagcggcggcctcgctgacagcggccgctgctgcggcttcgccatcttccgcgaactggtcggcggaaccgatcagaccgaactcggccttgaccttattctcaatctcctcggtgatggccgggttgtccttaaggaactgacgaaccttctcgcgtccctgaccgagctgatcaccctcataggtgaaccacgaaccggacttcttgaccacgccaacctgctgggccatgtcgattaccgagccctcacgggaaatgccttcaccgtagagcatgtcgaattcggcggacttgaaaggcggggccatcttgttcttgaccaccttgacgcgcgtgcggttgcccaccgcttcgtcgccattcttcagggtttgaatacgacgaatgtcgagacgcacggaggcatagaacttcagggccttgccgccggtggtggtttcgggattgccgaagaacacgccgatcttttcacgcagctggttgatgaagatggcggtggtgccggcctgagccaacgcgccggtcatcttgcgcagcgcctgactcatgagtcgggcctgcaaaccaacatggctgtctcccatttcgccttcgatttcggccttcggcactagggcggcgaccgagtcgatgacgatgacgtcaagtgcaccggagcgaatcagcatgtcggcgatttcgagggcctgctcgccgttatccggctgggagacgatgagtgagtcggtgtccacgccgagcttgcgggcgtaggccgggtcgagtgcgtgttcggcatcgatgtaggccgccacgccgcccttcttctgggcattggccaccacatgcaatgcgagcgtggtcttaccggatgattcggggccgtagatctccacgatgcggcccttgggtaggccgccgatgccgagcgccatatcgagagccaacgaaccggtgggaatcacctcgacgttctgctcgggctggtcgcccagtcgcattgcggaacctttgccaaaactcttctcgacctgcgccagcgcggtgtccagcgccgccttgcgcttgggatcgagctcgtgcttgtcctcggctgccgggtccttggccggcttggtctcaagtgccatgatcttctccttgtcgaagtcgtgtgcgaatcggatgcctccaccgtatgacggacatgccatgtgaggcaatccaaaccaaccattgtggttccagcttgcccgagcttggccacctggcctccttaaaccctactgcggtaaggattatggcagatggcaagcaccctgtgcacacgtatgcggcttcttgtcactgtggataactataaccacacacacgaacatttgttcgaatttggcgtgcaacacgccgaaatcgccaatttcacgattcagcgactccgtaatcccgcagtgtcagacggcgggcatgggcggcgcgttatgatcgtggccccaacgcttggagtccggaacctccatttggtcgcagagcacattccagaccacgcgtggctcctcccccgcgtccagcgcctcgaccacggtcatattcgccagtttgggcatccgttgatcacgcgacagcgaacgaccgtaggtccgaccgaacacctcttcaagtaattcccagaattcccgttcacgcatacacgccagtgtgccaccaaccgcaggacagcaaaaacccgcatcgccacaagcgatacgggttcacagctagacatagattacgggacgcggcttcacaccgccaaccgatcagccctcgaccgagtcgagataatcagccaccatgcgcagcatgcgcgaagtggagactccgagcgcatcggcgatggagctcagcagttcggagctggcttccttctgtccacgttcgacttcggaaaggtagcctagcgaaacgcctgccttctcggagacttcacgcaacgtgcggcgatcgcgcgcgcgcagctcgcgcagcacatgaccgatagcaccacgcagcgaaaactcgcgaggctcctcctcagccaccacgggctcggcggcggcagtcggcttgtacgacggcgaatcctcatcccacatacgctcacgaacggcttgacgctgatccttggccttcttggcggcctgtgccttgagcacctgctgctgggcgaacatcaccgcacggcgctgggccggagtcagttcacgcatacgggcgacacccggctgcacagccatcggcttcttggcggccacatccatctgttcgttcactcgggtcatcgtttccatcgccatcgccccttcccaggtcggttcagtgtttccactatgtacaacacgacaacccaacggttttattccttaaaacttgctgtgaatagactcaagttttgcagaacgtggaatacggtgaggcgacgaacctcttcgcgcatgccatcaagatggagttcgacggctttgagcacttcggcatggtccggggtgaggcttgcggggatgcgcaggcccacatacaccagtccggccggcttgtcaccgtccggaccggggccggccacgccggtggtggaaaggccgatgattcggtcgccgtattccggctggctgtataggcgagcggtaccgatggccatctgccgggcgacttcggggtgtacggcaccttctcgatccaatagggccttgtccacgtgcaggatcgaggccttggcattgatgtcgtaggtgacagcggagcccaacaacacgttggaggcaccgggaatacgcacgaacgcatcggcaagcaggccaccggtcagggattcggcgcaggcgattttcgtattgttcgcctcgcaaatcttgaggatgccggccgcgagactgtcgcacaattcccgcattggaatatccgtcacttccgcttcggggcgacgaacgtgttgtacaggtacacggcacccgagtagaggcacaggaccaatgccacgtagatgatggcgtaggtcaggaagtagtaagcggtcatccagaacggcgtggcttgtccgttacccagagaccagaacggcagcagcagcatggacagacccacgcactggaatacggtcttgagcttgccgggccatgcggcggcgatgaccttgccgcccggacgctccatgacgaagaaacgcataacggtgataccaatttcgcgaatcaggaacaggatggttacccaccagccgagctcgccgaatgcggagcatacaatcattgcgccgcaagtgagcagcttgtccgcgatcggatccatgagcttgcccatttcggtgacctgattgtatttgcgggccatccaaccgtcgattttatcggtggacgcggcgatgatgaacagcaccgcggcgacccagcgcatggtcaggttgttctcaccccaggcaccggcgagaatgtcgagtgtcaggaaaatcaccacgagtacgatgcgcgagtaggtgaccaggttcggcggcgcgttccatccgtcgaacagcgatgatttgggcgatgactgcttgtccattgtgttctcatccatagtgttcacgttacccccacacttctaccttgagtgagtattggctggatattgactgctattattcgggaatcaggttgcgtgctgatggccgcgtggccgcgcttctctctccgccccttcggtgcacctccctcatcagaggaaggtcgatgggtgaattattcgccgagttcgggctgttgcggggcggtggcttcgagcgagctggtttcgcctcggatgaaggcgagcacctgcggcaggtcctgcggctggacgagcacttcgcgggccttcgagccttcggacggcccgaccacgccacgcgattcgagcaggtccatgagtcggccggccttggcgaagccgaccctgagcttgcgctgcagcatcgaggtggagccgaattggctggtgaccacgagttcggcggcctgcagcagcacgtccatgtcgtcgccgatctcctcgtcgggctccatgctgtctttcttttcggcttccttggccatctgttcgatgtcttcgcggtatttcggcttgcgctgggtgcgcacgaactccacggccttgcgaatctcggattcggacacccacgagccctgcacacgaatcggcttggcggaacccatcggcaggaacaacgcatcgccctgaccaatcagggtctcggcaccgaccgtgtcaagaatgactcgcgaatcggtggcggacgaggtggcgaacgccagtcgggatggaatgttggccttgatcagaccggtgaccacgtccacggacggacgctgggtggcgagcaccagatgcacaccggcggctcgtgccagctgggtgatgcgctggatggagctttccacatcgttcttggccaccatcataaggtcggccatctcgtcgaccaccacgaggatgtacggatagggggccaccttgcgctgggagccggcgggcgcatgtaccttgccggcgcgcacggcctcgttgaagtccttgacgtggcggaatccgaagaattcgaggtcggagtagcgtgcatccatctctttgaccacccattcgagggcctgtgcggctttcttcggatcggtgatgatcggggtcagcaggtgcgggatgcctgcgtaggcagacagttccacgcgcttgggatccaccatgatcagacgcacctgttcgggcgtggcacgcatgatgatcgaagtgagcatcgagttgataaaactcgacttaccggaaccagtggcacctgccaccagcaggtgcggcatcttggtcaggtcggcggtcacgaagtggccttcgacgtccttgccgatgccggagagcatcgggttcgggtcgcccacggccttgtcggagcgcagtacgtcgcccaagtgcacgatttcgcgatcctcgttcgggatttcgatgccgatggcggattttccgggaatcggtgaaaggatacgcacatccgaactggccaccgcgtaggcgatgttgcgctgcaggttggtgactttctccaccttgacgccggggccaagctcgacctcatattgggtgaccgaggggccacgcaggaagccgacgactttggcgtccacgttgaactgttcgaaggtggaagtcagtgcccggatcacgcgatcgttggccggggtgcgcatcgcatggggctggcctttggtcagcaggttcaggtcgggcaactgatacggcctattggcgtcgtcgtctgtatcgttgccggcggtggcattcggctggccgtccgtattgggcacgccctggccgactccgctgccgtccgcatcggcacccgcgtaggctccggtcgcggctgccgcggccgcggcaccggcggctccggccgctcccatcgcaccggctgcccctgcgagcgcgacagtaccggcctgggcggcactgggtgcccacgggtcgtctaccgctcccccaccgggcatggcgacggtctggccactggtgatgacgcgggttcgggaagcgtcgccatcatctgcatcggcagcaggcgcagggctggataggtgcggacggccgtcgtacgaagacgatgcaatggttcgcgcaccgataatctcgccggtcatcggatcgaccaccggggtttcggcggtggcaccatgctggctggcggcacggtcgaatggatcgtcggcagcatacttgtcaagagttttgtcgtcttcggtcttggatttgcggccgaacagtcgtgcgaacaggctgggccgtgcatcgccggcctgatcgttgtcgcttccgtcatcgtcgccgtcatgcgagggaacaccgtcggcaaaggcgagagtggtatctcccacacggacctcgttggggaactggctggcgctcccatccgtctcctggcccatcggcacatacggtttgcgttggattttagcggcgattttgcgcgcatcctccggcaaatcggtgacgtgggtgccggtaatcatcagcaaggagaacaggccgacgaccacgaaaatgatgatggcgaacacgttggaaaggccccaggcgagcggtgagccgaggaagaagccgaacaggccgccggcggattgcagaatcgtgatgtcgaatccggtgtggtcggcggcgatcgccacgtcgatgatcgaacaaatcgaccacatgagcagcacccaaccggtgaccacacgcgggttattggaccctttaccggaattgcgcatgagtcggaaggccacggcggcgagcaacaccggcagcacgacgctcatcagaccaagcacaccggccgcgatggcgtgaagcagctggccgaatggaccgctgacgcggaaccattcggacgcgcagaacagtacggcgagcacgagcagcaggaagcacaaaccatcacgacggtaggctggatcgtattcgccgacgccggtgacggcgcgtacgccggagccgaacgcgcgcggaatcgcgagcaggatcttcttccacaacggctcaggttcgaggtcaagctcgggctggaccttggtttcgccatcatgggtagacccgttgtctttggatttacggggtttggtgctgttggaggatgctgttcgtgccatatcgggtctgattctactagtacgggggtgcatggttggtgacgacaccgtgacgatatggtcgattgacgaatcccgacagccgattcgccgcgttcgtctgagtcgattccccgctggggcgcgaatatgccttatcatgggttgcatgacacccgcagagcgtgcgagcgcagtcgcatttgcactcaagaactgcgcactggaagcgatgacgccgggcgaggcaacgatgcgcgccgcggctgcctacgaacgcggcttgaagcccgtgacccatctcatcgacgtggcggacgaacagaccgccatgcgtctgcgcgccgccgccgaccctgccggaaaggatcgtctggctgccggcagtctggatgatcatgccacggatcgggcggatgcggtgttcgcacgtaccgtgttgttggcggaacgtcgatggaatccgtctggcgacttggatgagctgaccgccattcataaggggctgttcgaaggcgtgtttgaggatgcgggcaagttgcgtacctcaaacaccacacgtgaggtgacgaacgaccgggctcgggccgcgaatcctgaggcgttcttcccggctgggctcattgagaccggcgcgcacaacatcgcgatggagttggcggacaagcgcaacctgcatgcgttggatcgcgacgtgttcgttcacgcatttgcttctatttatgatgagctcggttatctgcatccgttccgtggcggcaatgcgatggtgctgcgtatattcggttcacgcttggcgcatgacgccggctgggatctcgactggggctcagtgacgcgcgaagagtatcgctccgccaagcactcggcatatcggggcgacacgtctgcactggagacgatgttcgacgcgatactacgcccggcgaatccgacgcgcgtgttcttgatcgccggctggaatcaggggcctgcacactgattgcgggtgattgcatcggcctttggctgattcctacgccgtgatatcccccagatgatgctgggtgtattcgtcggctcgggcgtcgatcgggtcgtagtcgccggcgtcggcgtgcgcgataatggccatcgcgttgtcgaccagtttcgggttcagggcctgcagccagtggatgcgcgggtcacggccgaaccatcccatctgtttgcgggcgagtcgcttggttttctgtgcgatgtccgcgaaggcgtcgttcacatcccagatgccatccagcaggtcgatgatctgctgatagccgagcgcgcgtacggcggtggcacccagatgcgggcgcaaccgttcgacttcttcgatgaacccatcgtcatacatctgcttggtgcgcaaatcgatgcgatgatccaaatccgggcggtccaggtcgagtccgatctgcacggacggaatcacgtaccggtagcgcggcagactggccgaatacggtttaccggtaagctcgatgacctccagcgcacggatggtgcggcgtggattgcgtgggtccatgcgcgcggcggcctcggggtctttggcccgcaactcgtcgaacaaagcaccggcaccctcggttttctcgcgttcctcaagacgtgtgcgcacgtcgggatcggtgccggggaaggtgatgtcatcgatggccgctctggcgtacaagccggagccgccgacgagaatcggccggatgccacgtgattgcaggtcggcgatggtctcgcgcgcaagctgttggaagcgggccacgctcatcgtgtcttcggggtcgatgatgtcgatgagatggtgcggcacggccgcctgttcctcggcggtgggtttggcggtgccgatatccatgccgcggtacatctggtaggcgtccgcgttcacgatttcggcccgctcccccgcttcggccagacgccgggcgatggcgatgcccaaccccgtcttgccggacgcggtgggaccgacgatggagacgactcgttgcgtcatatacgccccctcagtgccgcacggaataggtctggccggcggccacgtcggggtcggcaagcagattatggcggccggcgtgtgtgacggtgaccgtgacgaaatcgccgatttcaggtaccggttcgccttcaggcacgccaatgtgcaccagcacgccggttttctcgcggccggtgacacggtgggtgtcggtgtctttcttgccgagtttgccggtgatcatcacttcgacgtcgcggccctcgaatgtggcgaggttctcttcggtgatctgctcctgcaacgccaccagacggtcgaaccggtcctgcaccacgtcgcgcggaatctgttccattgcggcggccggcgtgccggggcgtggcgagtagatgaacgtgaacgccgaggagaagcgcgcctggcgcaccacgtccatggtctgctggaagtcctcctcggtttcgccggggaagccgacgatgatgtcggtggagatctgcgcgtcgggcatggcggcgcggatgcggcccagtatgtcgaggaacttggcggagcggtaggagcggcgcatcgcgcgcaggatgcggtcggagccggactgcagcgggaagtgcagctggtgcatgatattcggcgtttcggccatggctgcaatcacatcatcggtgaaggcggccgggtgcggcgaagtgaagcgcacacgttcgagaccgtcgatggtgccgcaggcgcgcaacagcttgctgaaagcgtatcgatcgccaataccataaccgaacgagttcacgttctggccgagaagcgtaacctccttggcaccatcggccacacattggcgaatctcatcaagaatgtcaccggggcggcggtccttttccttgcctcgcgtggtgggcacaatacagaacgtgcaggtgttattgcagcccacggaaatcgccacccacgagctgatgcgggaggcgcgggcggcgggaagctggctcgggaactgccgcaattgttcagtgacctggacctgcgccttgccggtcgcacgattctgatccaacagcttgggcagatcttcgatgttcttggtaccgaacaccgcggaaacccatggcgcagtatccgcgatcttcttgcggtcaagctgggccatgcagccgccaacggcgatctgcaggttcggccgaaccagtttgacgcgattgaatcggccaatggtgccatacatgcgttcggctgcgttctcgcgtaccgcacaggtattgagcaccagcaaatcgaggtcattgtcattgatctggtcctcggttgcaggcacgtagccattggcctccagcacgccggcgatgcgctcggaatcgtgcacgttcatctggcagccgagcgtatggatatggaacacgcccttgccgcgctcccccagcaagctatcggttccatcggctgcaatcgaggcacgctccgcctcggtcatcatgtcttcattcataacgaccgattctatcggcggggttcgtcatgatccggccacgcatgccattggttgtcacgatgtcaaattatgggttcttggaaagattccccgcgaacgtccagattggctggaatccgccgagtatattggtggacgtgatacttgaccgacatagccgactcaaaacctccgatctgcaagcccgtctcaaagcgttggatcttccgggaggcaccttcactcccgaacaggtcgttgaattcgttgacctcatgcaggtgtatgaaggcgcgatgtacgagatcagcaccaaactggagattctcgacgacgagttccaggtgcggttcagccatgacccgatacatcatatggaacgccgtctgaagtcggtgagctcgatcatcggcaaactggagcgcaagggtctgccgattggcgtcaattcgattaaggacaatctgttcgatgtggccggcatccgcgtgatctgtaattaccgcgacgacgtgtattccgtgtccaactatctgtcgtcgcagtccgatattcaggtgctgcgcgtcaaggattacatcaagaacccgaaacagaacgggtatcgttcattgcacgtaatctacgcggtgcccgtgttcctctcctcgggcgcgcattacacgccggtggaggtgcagttccgcaccatcgccatggattattgggcgtcgctggagcatgcgctgcgctacaagaccgatttgccggacaacaagctcgccgagcattcccagacgctgctcgactgcgcgcgctcattgcagaacatcgaggtacagatgcagaacatccaccgcgacatcaacggcgcgccgcaagtgggcgaagcgcctaagacctcggactgaggtgctatggaatcggcctgcggccgattcattcaccgttgcagccactccggcagcctggccggcgcttgtgccagtagggtgccgaggaagatgagggcgcagccgaggtagccgcgcggggtcatcacttcactgagaagcaacgcaccgcctaccgccgagaagaacgattcgaggctcatcagcaggctggctcgcgtcggtggcacccattgctggccgaccacctgcaaggtgtacgcgatgcccaccgagccgatgccggcgtacagaatcggaatccaggaatgagcagcgccggcccagtcgaccgagccttcgatcagcgaacccgcccagctcagcacggcggtggtgcagaactggccgaatgaaagcttgatggcgtccacggtgccgcccaaagtatcgatcaccagaatatgcacggcgaacagcacggccgtgaacacgagcaggatatccgccaggccgatcgaaccgaaaccatcggtgatgcacagcagatagaagccggcgatggacagtgccacggccacgaacaccagcatgccgatgcgccggcgcaggaacacgaaggccagcaacggcaccatcacgatgtacatggcggtcaggaatcccgcgcggccggccgatttgccgtacagaatgccatactgctgcagggtgctggcggtgaacagcacgatgccgcagatcacggaaacgaccaccgggttagcgagcaatcgcgccacggccgaatcgggcttgttcgcattcagcttggcaccggtgatggtaacgacgtcggatgcaccgttcgatgcggcatctgtggagacggccccggatgcctcggccccaacgacatcggccccggctgtatcgcccttatccgcgctcccccggccacgctgccacagcagaatcggcaccaaagacagtgctcccagcgtgaagcgcgtggcgttgaagaacatcggcgacatcgaatccataccctggacctgcgccacgaacgcaaaaccccagatcagcgcggtcaacaacaggctcagcatgcctacgagttcttgtcttttcacggggagccagcctaacgtgcgaatgtgacagacatgaaaaagcccggccacaatgtggtcgggctgtgacgtttgacgggcaggctacatgccgctcgccaatcggctgtcgaggctagtccctgttgccgagcagctgcaggatgtacaggaacatgttcacgaagtcgaggtacaggttcagggcgcacaggatggagatcttcttgaccatttccgggccctgggcctcgtattcggtcagcagcgcgcgcgtggactgcgcgtcgtagatggtcatgccggcgaacaggatcaggccaatcgcgcacacgatcttggtcatgccgtcgacctgcacgaaggcgagcacgatctgcgagatgatgagcacgatcaggccgatcatcaggatcgggccggccttgagcatgttgaacttggtagtcatgccgaacatggtcagcgcgaagaagaacgcggcggtgacaccgagtgccacgccgatcgagccgaggtcgtagaccatgaagatcgagctcaaggtgaagcccatcaatgcggcgtacacatagaacatgacgcgcgcggtggccgacttcatcttggtgacgcgcatgccgagcaccacggccagagcaatctgcgccacgcacaggccgatgaggcccaccatgccggtggccatgaggaagctgtagtaggctccggtgatctggccgagcacggcgaccacggcggtgacgaggatgccgatggtcatctcgccgtacaccttggtcactgagactcggcgggcctcctcgtagttgtaggtcatcgtcgtgttgatggtggccgcacccgcaccggcaccagtaccctgcggcacgtattggtaggtgggagcgccctgcggctgggcatagtagttctggccgtaaccggactgtgcgtattgctggccatatccagactgttgggcggcgttgtaatcaggcgtgttgtattgcgggttgtattgcccgttgttctggggctgctgaccgaatgtcataatcgctcctttagcgtttgttccagtaccaatcttagaggaacaaagctgaacattccatgaatatgatcgatcggctcgttctgctcatctcaaagcgtaacgggcgtttccaccatgcgcgtggcatgcacttgagattcgattgacattcgatcgcagcttggaccgccgcgcgattcactgcaacgtgaaggtatgcgtcaccttggtgtcttgatccgttgataggaacgcagtgacatccaccgtaatcggcgaatcgtcttgcagcacatagcccagcgtcaccgttgccgcggtcccgggctgtgcttgggccaaatacgaattcgcgtcatagccttcaggctgatcgaagtatactgccgtctccagttcggtgccgttctggaacacgttcgggtgagccaaagtggcgaacgagttgttcttggacgtgttgttcgtccattcataagtcaccagagcggtgggcttgccgttatagtcgttgacgcttttcacggcggagactattttcacgtgggcaccttcgatatcaccttccaaatcctgctcgccctgcgctttctgctcggatgccttgctcttggaggcatcagacgatttgcccgcggactttgatgatgaggattgtgacgtgtcgatgcccttggactccttaatggaatcgtcaatggccttgctggcagcggactgcatggccagcgtgatcacaatggccaacaccgacagcaccgccgccacaatggacagcaccttgccgcgtttcttgccccggaaggtgcccactatggcgataatcgccagtatgacgccgatgaagccaaggattgcggcgatattgttgacgatgggaataaaactcagcaccaaacccaacgcgccaaacaccacggccgcgatgccgcagatggtggtatgcagatgttgcggttgcggcggctgaggctgaggctgttgtggctggtactgctgtggggatgagggaaccggctgcggggtgatgttgtggttggacatgatgtgctccttctcgtatcttccccgaaatagggatgtgagcacgacgctaccggccgcgaaacagcgacgttagtggacgaacggtcattgttcgttgcctgttcgggcaatacggaggtgataacggtgcccgcatgtccagtggcgggggccggatgcaggtcatacagtggaaagcatgacgaacccacaacgcgcctccgggccataccccggtttccgacccggctcacggcctgacgctcgccctatgcccggcacggggtccccggttcctacaccggatacggacgaggtgcccgtgactacgcgcgtatggtgttcggtcgttatggtgccattggccagtttcatgtgcatggcgcaaacctcgttcttcgcccagaattttgcgcaggattccgcaggatacacgctgatggtcctctgcaccttgctggcattcccggcagggttcctgctcttggcccgcagcgaatacccggaggcgacgttctggatcgcctgcgcgctggtggtcgtgttcccgttcgattcgctgatcgcattgatggcgatgacctcattgctcgcccgtcgttcaaaccggaatacgaccatccgcgccacggttggcggcaccatcgtaacgctcatctcccagcttcgtgacgccctgcaacagcccaaagcctcgatttggcatctgattttcgctcaaccgcataccggcggcgattcaggctccccgatggtgatgctggtggaggagccgaccgtcatcatcaccgccacggtggcctcactggtgttcgtgaccatcgccacgctcatcggcctgcatatccgttcgcgcgcccgcctgcgcacggcgaacgcaatggccagtgcggccaccacgcatgccgcgaccctgcagaccgacctgaccaaccagcagctcgccgacgccatcgccgccgaagcgcacgacaccctcgcgcattccctgtccctgatggccctgaacgccagcgcgctcaaggcggaggcggccaagctcggcgactcccccgaagcgcaatcgttggcggacaaggccgaggacatccgtcggcagtcggccggggcattggacgaggcccactcgatcatcgacatgctgcgcaatccgcgccaggcatgggagcagctcgccccgtccgacgacacgtcgctgacccgcgaatcgctggacgcgctgattgcggacacgcgcaactcgggcacgtcgctcaacacctggatcgatatccagcagctgagcgtgctggacgagacgatcggcaaggtggcctaccgagcgattcaggaaggattgacgaacgcgcgccggcatgcgcccggagaaccggtgtcgctggaggtctccgccacgccgcaggcgggcgtacacattcatatcagcaatccgatcgccacggatgcgaccgagacgcagcgggcccatggggccggactgcctggtttggcagcgcgcgtgcactcggtcaacgggcaatgccggtatgggatggacgataggcacctgttccatgtcgacgtgcaactgccttggcgcagctaagatggctagcgtgagtgagaagaacgggaatagtgtgtctggtggaaagcccgaacgcggcggtccaatcggaagcggccccggcttagagcccaagccgatccgggtcagcgtcatcgatgacgatccgatgatctgccaggcgatgagcctgatcctcaacgattattcccacgggcgcatcgaagtcgcctccacgtccaccgatggcgagacctgcgtgaggcgggctgccgaggaaaagccggatgtggtgctgatggacatcgccatgcccggcgtggacggcatcgaggcgacccgtctgctgcgctcgctctcccccgcgccgcacgtgctgatcctgacctcgttgagtccgtccggcaccgtggaacgcgcggtggaggcgggcgccgaggggttcgtgtcgaaaaccgatgcggcggacgatatcatccgccgcatcatcggggtatgcgagggcgtgccgcagttcaacacggccagtcagaaacagctgatcgacgatctgagcgtcacgcagccgcgttcgcgccgcgatgaggcgcgcgccctgctcgacgcgctgcccgaccgcgagcgcgaggccgtgatgctagcggccgagggctatacgaacgccgaaatcgcctcccgcatgttcatttcggagcgtacggcgaaggcgcatctttcctccgcggcgaacaagctcgacatgggccgcgtgcagatggcgcggctggtggagcgggccgatctgccggcgcggctgtaagtcgtccggttgttgagccgtatcagtcataatgggaatatgagtgaagcgattattcgaacattacgtagggatgactatccggcgctgatcgacctggtgcgccgcacctggtatgccgaattcgatgagcggaccggtctgctggcggccgaagcggactgggagaactgtctggcgcgcaccaccaacgcgttcgtcgccgaactggacggccagccggtcgccctgatcgtggggcgcgtcgatgcgctggaccatcggagcccgctcaactcgcatcggatcaactcgtggaacgcgctggcgcggctcgtgttcgcgaagggcggaatcaaggccgccggcgagattctgggcattctcggcatcgacaaacggctgcgcgcccaggccgcgagcgccggacatgactatgcggcggaagtggtgctgttcgtacttgatccggcggcgcgcggccacgggctgggccggcgcatgttcgagacgctgatggacgcgttccgcctggccggcgtgcgcgactacttcctgttcacggacaccacatgcgatgtcgggttctatgtgcatcgcggcctgacgcaggtgtgcgagcagtcactgcccgcatccgtgccgggagaaaacccgtcttcgttctacttgtatgaggggtcggtgcccgagccggcgtgatgtgcccgccgtcgggcaaacactggtaggcttgagcacaagttggtatgccggcataccgtccacaggccggcgacgaaggggctgacatggcaatcagtgcgaaggaactaccactcgggaaagtgttcaccccggatttccggttcacgatcccctcattccagcgggcctacatctggaagaccgagaacatcctgcaactggtaagcgacttggatgacgcctgcaagtcgcccggtactccgtacttcctcggctcgctaattctggtgcgcgagggcgataaccgttacgacgtaatcgacgggcagcagcggctggtatccctgtcgatcatcatcgccgtgttgcgcgatctggagcgcgatccggacctcatgcgccaactcgatgcgctgctggtggagcccggcgacaagctgcgcggcatcgtcaccgagcctcgcctcacgttgcgcgagcgcgacgcagcgttcttccgcgaacacgtgcaggaagacaatctcgaatccgtgttcgatatgaacgacgatgatctagcgaccgcagcgcaacgcaatatcgtagccaacatccgtaagacgtacgacgagatttccaattggtcggatgccggacgccagcaattcgcgcagtatctggtcaacgaggtgacgctggtcatcgtgaccaccgacgatctcgacggcgcgcatcgcatcttcgacgtgatgaacatgcgcggcctgccgctcacctcgtccgacgtgttcaaggcgcgcgccacggccggcctgtcgaccgccgaacttgacgtgtacgccgcccgttgggatgacatcattgacccgattggcgacgatccgcatgactgtgaggaattcttcgcctatctgcatctcgtgctcacgcacaagccggccaccgacaagctcatcgaggatttcctggccgacgtgctgcaaccgtacatcgacaaaggcacggtgcccacgttcatcaaccaggtgctggcaccctacgcgatggcgtggcggatcatcgcgcgccccagcgataccgtactgcccgccgaggtgcgtagccggcttgagggattggatgattaccgcagccacgaatggaagcccgtggccatgtgggcgttggtcaattcgtatcgcgggctgggcgacgccgatttgtcgccgtttgtggttcgtgcctcgcgtatcgccagaaccacggccacgctggaatcgttgggtgcccatgacgagcgtcggctgctggaaattctgaccgcattggaacaggtgaccggcatccgcacgctgaatcgcactggagcgttggagcggcgcggttatgcgaacgccgccatccgtgatcttgacaagggctatctggtccagcgcgtgaacgggttgtatgtctcggacggcgaccgtgaaggcgcattggtccgtttgcatggcgagatgcagggtgacggcgatttggtccgtctgctgctgattcgcgccaacgagcagaaggccggcatgcagttggatcgaccacgccggttcagtgcgctgccgattatgccgttggacatcgaacggtcgaaatcgtttgcggactggccgcaggatcagcatgatttctggatgtaccgactcggcaatatggcgctggtgcagggccctgaggatcagttggacaggttgagtgaatatccggcacgtcgcgaccgcatgctgctgcgcgcggattcgcgtcgtttcccgctgaccaatcagttgaaggatttcgctgactgcacacccgcattgctggaagcgcggcaggaagaggcggtccgactcatcgtggaatactggggcatccggtatgacaaggacgcccgcgatctgaccaagcagaatgtcgatgagttgtcgaagacttctccacggccgtctcatagttcgcggcgcgtcacgatccggcaggtgattgacgcgggtcttctggtgccgggcgaacgtctggtgtgggagcggccgcgcaagggcgagcgctggtttgccacggtcaccgaaaacggtcgtctccgtctggatgacggctccgaatatccgactccgaccgccgcggcccgtgccgccgccggaggacgtcgcggcggcggtctggacgtgtggaagcgcacgcgcaacggtcagaagctcagcgacatctggaagcagttccgcttacaggcgcagtagtctacagtaagccggcacatcattggtggctcccctccgtgagggaagccaaccgctcatttattccagtgccgccacgatttcagccggtgttttgcaatattcgggaaaatgactgattaattcggcatccgatgtgaccacacagttggcaccggattgttgcgcggcaacgatgatcagatcatcttcaaaatcccgatgccgtttttgcagggaaaaagccctatcacatgtcgactcatcgacagcgacaatgtcacacatctccttcacctgctcgatacaacgccatggcacccgtgacgacagaaagccgcgagtgaaattctccacttccgattcattcggtttgaattcgctacgaatcgccgatgatgataggtatgcgatatccttcagcgacaatgacgcacacaacaacgtaacgttgttcttcgcgccaagttccataaccgcttccgccatcttggcgtgatcatcgcgatggagcaaatagtccaacagtacattggtatcaagcaaaatacgctgcatggaaacgtcggtcatcaatcggccctcttcatgttgtaatacgtatcaagttgctcgtcgtacattttgtcgcggaactgcttgtaggtaaggccttccatgaggtcggtgtcttctgagatcagtccggccttgaccagttccttgtgtacgtatccggcaccttctcgaatcagtttcagcttgcgctgcttttcctcctcgcgggcttgctcttcggcggtcgtttccaatgccggcacttccttgcggtcggcgatgtacaaccacagcgaccggattacgtcactcaccgatacgcctttgcccttgaggacttcttcgacctcgttcttcagtttcgcatcaatgcgaacgttcatttggaccatggtcatggcaacctccatttcgaagatgctatacagtatagcattttggcatgcgtggaaaaggccggtatccgttggcggataccggccttgctccccccagtcagcttcgctgacagctcccctcaagagaggggagccaagaaggtggttacttcatgaggttgcgcagcacgtactggaggatgccgccattacggtagtagtcggcctcaccgggcgtgtcgatgcggaccaccgcgtcgaactcggtcttggagccgtcctcgtgggtggcggtgacgtggaccgtcttgggggtcacgccctcgttgagcttctcgacgccggcgatatcgtaggtctcggtgccgttgaggcccagggactcataggattcgcctgccgggaactgcagcggcagcacgcccatgccgatcaggttggagcggtggatgcgctcgaagctttcggtgatcacggccttgacgccgagcatcaccgtgcccttggcggcccagtcgcgcgaggagccggtgccgtattccttgccggcgagcaccacgagcggcaccttgttgtcgatgtagtcgcgggaggcttcgaagatcgtggtcggcttcttggcgaggaagtcgtaggtgaagccgccaggcgtcacctcctcgcccacggaggcgagcagctggttgcgcagacggatgttgccgaacgtgccgcgcaccatgatctcgtggttgcctcggcgagaaccgtaagagttgaagttcttcggctccacgccgcgctcggtcaggtacttgccggccgggctggaggccttgaacgcgcctgccggggagatgtggtcggtggtgaccgagtcgcccaggagggccagcacgcgggcgccgtggatgtcggcgaccgggtccggcgtggccttcatgccgtcgaagaaggtctgcttgcgcacgtaggtggacttgtcgttccacgcgaacagctcgccttccggcacgtcgaggcccttccagcggtggtcgccgtcgaacacggaggcgtagtctttgaggaacatctcgcggctcacagtgccgtcgaccacggcggcgacctcggagttggtgggccagatatccttcaagtacacgtcattgccgtccgcgtcggtgccgagcggttgggtttcgaagtcgaagtccatcgtgccggcgagcgcgtaggcgatgaccagcggcggggaggccagatagttcatcttgacgtctgggctgatgcggccttcgaagttgcggttgccggagagcacggcggtgacggtcaggtcgttggcgttgatcgcctcggagatctcgggcagcagcgggccggagttgccgatgcaggtggcgcagccgaagccgacgagctggtagccgagcgcgtcgaggtcgtcctgcagaccggcggccttcagatagtcggccacgacctgcgagccgggggccagcgaggtcttgacccaaggcttgggcttaaggcccttggcatgtgcgttgcgggcgatcaggccggcggcgatcatcacggacgggttggaggtgttggtgcatgaggtgatcgaggcgatggccacgtcgccgttttcgatgtcgaaatcgccacggaagtcggtggacacggccaccggatccttgacggtcttctcggtctcgtaggcgggggcggtcttctcgaacatgctcttggcttcggacagcagaatgcggtcctgcgggcgcttcgggccagcgatggacggcaccacggtaccgaggtcgagttcctcgtattcggagtactgcggttccacgtaatccgggtcggaagcgtcgccccacagcttgttggccttggcgtaggcttcgaccaacgcgacctgctcttcggagcggccggtcaggcgcaggtagtcgagcgtgacattgtcaatcgggaagatgccgcaggtggagccgaactcagggcccatgttgccgatggtggcgcggttggccagcggcacggaggcgatgccttcgccgtagaattccacgaacttaccgaccacgccgtgcttgcggagcatgtcggtgatggtcaggaccacatcggtggcggtaacgccctccgggatggagccggtgagcttgaagccgaccacgcgcggcacgagcatggagatcggctggccgagcatggcggcctcggcttcaatgccgccgacgccccagccgagcacgcccagaccgttttcggtggtggtgtgcgagtcggtgcccacgcaggagtcgaggtaggcgagcgcgttgccgttggcctcggccttgctcatgaccaccttggccaagtattcgatgttgacctggtggataatgccggttcccggcggcaccacgcggaagttcttgaatgcctgctgaccccagcgcaggaactggtagcgttcgccgttgcgctggtactcgatgtccatgttttgctggaccgcgtcggcgatgccgtacttgtcgatctgcacggagtggtcgatgaccatgtcggactggacctgcgggttgatgacctccgggtcgccgccgaggtccttgaccgcgtcacgcatggtggcgaggtccacgatgcagggcacgccggtgaagtcctgcatgatcacgcgggacggcgtgaactggatttcgtggctgggttcggcgttcggatcccagtcgagcagggtcttgacgtgctcgtcggtgatgttggcaccgtcgatgttgcgcaccagattctcgaccagtaccttcagcgagtacggcagatgatcgatgccgtcgagattggcgatgttgtagtaatcgaagtccttgccggctgccttgagggtagccagctggtcgtcgcgtaaggacatgcttcctccgaaatcatgaatcggcttatgatgccgctgattatccgctacacatggtacgggcacgttaccgaggctctggcgtgtcggcttgaagtatgagacaatcgcgccgccgtctcaatgccgacgcgagagcttgcccgtcagtccgcgcacgagcggcgccagccacaggcacagcgcgaagatcagcgcggaaccggccaacgcgatcagcgtggccaccatcgtggcgccggtcggcagaatcagggcgaagaagttcgccacgaacgggacgaacgcgccgattacgcccgccgccgcgaacaccgccaccagcacgccacgccaaccgttgagtggtctggccacgcgggccagcacgaacacgcccatcgcgaacaggatgatggcgctggtggcgcgcagggcggacaggtccgcggcatcgccggtcacgttccagcccatgaccggcggcagcacccaagcggccagcagcaccgacagcgcggtggcgatgccgcccggcagcgcgaacgtgaccacgcgcttgaggaatcccggaatatagcggcgcgtgttcggcgcgagcgccagaatgaacgcgggcatgccgatggtgagagcgccgatatacgtgatatggcgcggcaggtatgggtatgggatttgcgtcagcactacgccgagcgagatcagcgcggagtacacggttttgacgaggaacaggctggccacgcgctccatattggccatgacctgacggccccgcgccacgacgtccggcaggtgcgagaacttcgaatccaccagcaccacctgggccacggccttggtggcgggcgccgcattgcccatggcgatgccgaggtccgcctccttgatggcgagcgcgtcgttgacgccgtcgccggtcatggcaaccacgtggttctgcgtgtgcaacgcctgcacgatggccttcttctggtcaggcagcacgcggccgagcacatcgacgttttcgagcacgcgggccagttcgttcacgtcctcgggcagttcgcgcgcgtccatcgccaccggctcatggtcgcctgtcagtttcactctgcgggcgatggcacccacggtcactggattgtcaccggaaatcacacgacagcgcacaccctgctcacggaaccaagcgagcgtccgctcggcgtcctcgcgaatcttctcagagcacaacaccaacgccaccggctcagcctgcacatccagttgccggccgtccgagacattggctccctcaactgctcccctcagtcgcttttggcgacagctcccctcggagaggggagctgtagaccgcgcaaccagcaacacacggttgccgtcattggcatactcgttaacctgctgcaacaccgacgaatagtcaccctcaagcgcagaaataatcacctccggcgctcccatgtaccaggtctcgccggatttacgcaccgcactccatttgcgcgccgaagagaacgggacacgagactcaaccgcacctgccccatatccttgggccttgagcccggcgagtacggcttggccggtgccgttgggctgctcttcgttgcagcagtcgtagagggcctgcgtggctgcctgttccgcagccgcattggcggaatcgagcatcacgagccggttgaaggcgataccgccatcggtgatcgtgccggttttatcgaggttcagcgcgtccacgcgagccagtgtctccacggattcaagctcctgcaccagcgtattgtgacgggcgagacgcatggcggccaccgcgaagttcagcgaagtcagcagcaccaagccttcgggaatcatgcctactacgccggcgaccgcggaaaccacggcttgccgccattcgccggtggagagtgccgtgccccaaccgccgaccgtatgaatctgcgaaagaatcagcagaatgcacagcggtaccacgaggaaggtcatgaatttcagaatcgtgttgatgcccttgttcaggtcggacacggttttcttgtataccttggcctgcgcggtgagcgtggcggcgtaggaatggctgccgaccgcattgaccttgaccaatgccatgccggagaccgcggtggcgccggaatacacctgctcccccaccttgtggcgcacggtacgcgattcgccggtgagcatggactcgtcaagctccagtccccaggtctggatgatctgcccgtcggccggcacctgttcgccggcacggatccacagcaggtcgtcgagcacgatctcgttgtggggcacctccacgtccctgccgtcacgatgcacgaggaattcggaggccacaaggatggaaagcctgtccagcgtgcgcttggccctgagttcggtgacgatgccgatgcccgtgttgatgatgatgacgaaaccgaacaccgcgtccctccaggaaccggtgatcagcaccagtaccatcgcggcgaagatgatgccgttgaacagcgtgaatacgttggctcgcacgatatcttgaaccgaacgcgaggtggatgttttcaccgcattcgattggccactttcgatacgctgcaccacttctttgggggtaagaccggtcgctccgatctcaggcatttccacggctgttgttgcactcatattctccagcctaccgcgtcttgtttcgcaatccgctaaggctcagggatgattcagggtgctttctcagcttcaagggcctgattcggctcaggaaacggtgactttgatctcgcgttcgtggggttcgtcgcgcgtgatggtgagcacggcgtcagtaatagtcattggcttggtatcggcagtgtcgccagaatcggcactgttggtgttgaggtgaaggatgacggcgtacagcagttcatcttcgggcgcatgctttggatcaatgagagcgactggaataccggcttcacgcgcattggtcaacgtctggttccagctctcccggttggcgtcggtaacgtcgatgccgctgataaccacgattttgaccgcgcgagctacgaaatcggcaacaccctgctgtgcggtgaccgcattcttgtcgacgccagtatgagcatccatactatcggcaccgttttcgctggtagtgccggcgtcagaagattcggtttcaccggatacaccatcagttgcgtttgccgagcttgcggatgtttcgagcgaggcatagtagacattgagtttgtcatcagacagcgcattgatgacgaactcgtctgcggcggtgtcagtcgaccccacaaagccgactgtgacatccgtgggatgtgtggaatcgtgggcgacttccggcatgctgtcttgggtatcgccgaccgccctaccggccggcgtgcaggcggccagggacaacacagccgccatgcaggccagcaatccgagaattcgtcgtgtcatatgctcacctgtcagcgggtaaacagggccaccgtctcaacatggtgggtcatcgggtagatatcgaaggcacggatgtctttgagctcgtagccttcgccgatgagtgtcgcggtgtcgcgtgcgaggctggtgggatcacaggcgatgtagaccacgctggatgcgccggccgcggcaatctggcggcagaccttggcacgagcaccggcacgcggcggatcaagcactacgacattcggcttggccagatgcgccggcacatggtccagcgtgcgcgagacatcacccgcgcgggcgtccacgtcgttcaggttcatggcacgcaggttgcgctgggcgttcttgacggccacacgcgcgccttcaacgctgagcatgcgggtgcgttcaccggtcatcgtggccagcggcagggtgaacaggccggaaccggaatacaaatcccagattacggcgtccgccgctgactgcagctgcccgttgaccagattgatcacgtgcgtaccaagggcgatcggcgcttggcgatgcacttgccagaacccgttggcgtcaacctgatagtcgaaggtcgtgccgttgatggtcacctgttcggtgagcagctgggagccggcgcgcagttcgccgtccacaagtacggcgtaattgtcgtctgctgccgcggtatcgacgatctcgccgcgcggttcgggcacggaaagacgaatctgggagccgggttcaaagccgccttcccacacgtgttcgcgcttggcgacgtccagcagcgtgcgcgtggcaagcggcatggtgtcgatggccacgcggttgtgtgtgccgcgccggcgcatggatggcatgccgttgtcgtcggcaatcatttcgatgcgggtacgccaattgaggccgccggcttccttgtcgccgggcatgcgctcgatgggaacggccacgtcgatatggccgagtcggctcatctgttcggagacggtgatggccttccacttgagctggccgggcaaagagacgtgcacgagatccgcgccgcccactcccccgcccatcgccaagggaccggcaagtggccatgccggggtggctcggtcttcggacggctcgagaacctcgacgacttcgccggtccagaaccggtcgtcccggtcgtggggctcgtcaagttcgactcgcacgagttcgtcgggcaaggcgaagcggacgaacaccacacgaccgtcgatatgggccacacagcggccttggtcggcgtatcgttcgatacgaacttcagcttgcatcatcgtcctttccggttgcgctcggttcgagttcggcatcaacagcgacttcagtctgtgtcttcttagccgcgaccttatgccggtgcatcggcgtggcgataatgaggtaactcacccaaatcgccaatgcccagaacggaatgcccatgagcaggcgggtcacgccgagtgcagccacatggttggtcagatacagcggcacctgcaccaccagccgcagcaggaacagaccgacccaaaggccggtgacaatcatataggcgcgtttcagggccttgtcgtccatccagtcatggaaccatgccttgaaatgctcggtgggcaggctacggatgaattcgacgaccaaacccagtccgggcacgcgcgcaatcagcgacacggcaagcaacgcggcatagccggcattggtaatgaatccgaagatgtagtaattgcgggcctcatgagtctgccatgcccaaatcaggcagatgcctaccgccaccagaccagagaccgcgcccattaccgactggcgctgaatcagtcgcacaataacctgcaataccgccagcacggccgaaaccgcaatggtgagattcagattgctcgtggccacgaacagtacgacgaacaccacgccgggcagcatggattcgatgacgccacgcgggccaccgatggcgtcgatgacggagaaatcctcgccttcattgccggcgtcggctagagcggacaggccggtgcgtttgttgtctgccaagtctcttcctatagatcagcgaacttcggagaacatcgggccgcgagacagcgtggtcttcacttcggtctgctggtcctggctcagcggacccttcggcttgttgtccggaatgtccttgaagtgtcccttgccgttctcctcgccggcttcggccgcggccttggcggccttacgctcagcgggggcgaccggcggatgcatcgggatcagatcgcgcggcgccaaaggctcctcaccacgctcgacgacgatgccggcgaagaacttgttcagcgcctcggtctccgggctgtccggatcgatagcagccttgccggagaagatgccacgcagcatccagcgcgggccgtccacaccaacgatgcgcgtgttcacggtcttgccgcccttgacattgaccggcagcttcagttcggtgccgaacacaccgtccacttcagaagcggccttgttggcttcaagcaggtcaccgcgaacgtcatcccacagtcccagggtcttgggtgcggcaaaggcttcgatctccaggctggaggagccgaaggtgatggtggagccaagcacttgctggatggcgcggttggccttgatgcgcagctggatgccctggaggaagggcaggtagtaggcgccgagatccagataatcgtcataatcgggcacgtcctcatcgttgacgtcccacgggcctcgctcttctccgcggccctggtattcgctggatggttccgccaatacggtttcagcgctttccgcctttgctgcggcgtttgcggcctcggcggccaccttgtcctcatcgacaggctcaacggccggctcggcttccttcttgctcttcttcttgccgaatccgaacagtcccataattcctcgtttcatgtaacggttgcaaccttgctaacactagcactcaggcttagagaaagctgagcatcgcggccaccgatgtccggttcgattcgtagggaggccaaaatagtatggccgcatgaccatcaccattaccacgtctaacgtcaacggcattcgtgcggccaagcgcaagggcatcgaggattgggccggcaagcatgcgccggatgtctggtgcatacaggaggttcgcgcgcctcaggacgatgtcgattctattttcgatgaatttggtttcgaatacgccaccgccggcaagatcgaggcaccggccaacctccatgccatgaacgaggtctgccgggtgaaaggccgcgcgggagtcggactgctcaccgacttggaagtgcttgacaagcgatatgggctgccaggtctgagcgaggatgtggattcagggcgttggatcgaaaccgatgtcaaaacgcctgagggctacgcgatcaccgtggcatccgtatatgtgcatgctggcaacaccgattatccgaccaaaatggaacagaagtaccgttttctggacacgatgctgaagcgcatgggcgcgttgcgggacgaggctgcgcatggcggcaaacaggccgtgctctgcggcgatttcaacatcgcgcacacgccgcttgatatcaagaacgccaaggccaatgagaagcacgccggatttctgcccgaagaacgtgcctacgtggacaaatggctggacgaatacgagttcgtggatgtgatgcgttcgttggccggcgacattcaggggccatacacctggtggagccagcgagggcgcgctttcgacaacaatgtcggctggagaatcgactaccagttcgccacgcccgagttggcggagaccgcacgcggattcgtcatcgacaaggctcccacgtatgacaaacgctggtccgatcacgccccactcacgatcacatacgaggtatgacgtattccgtgggacaacatccgaaaatcgacgattttcgcgggccgtcccacaccccacagcatgagtaattatcgaccacactaagaatggcgtaattccggacttcgtgagaaatctgctgtgggacaacattcatgtccatcgattgatgttgatgttgtcccacaatttgtgggacaacatcgggaaaacaccaatttttgcctttcgtcccacgcgaaccatcatgcaaacctgcgcatacgaatattgggttctttccacggatggaaagaacccaatacaatgcgctcaaacgcagattatcagtccaaaccgagctggagcttgccgccggggatggcgtcgagcaggtctcgggtgtactgcttctgcgggtggtcgaagacctcgtcggtggtggcatgctccacgagcttgccgtgctgcatcaccacaacctcgtcggcgatctgacgaaccacggccagatcgtgggtgatgaacaggtagctcaggcccttttcggcctgcagatcgttgagcaggcgcaacacctggtcctgcaccagcacgtccaaagcggacacggcctcatcgcacacgatgacgtccgggtccagagccatggctcgtgcgatggcgatgcgctggcgctggccaccagagagctcgttcgggtaacggcccatcacggaagccggcatctcgaccatgtccagcagttccttgacacggttggcacgccacttcttgtcgccgatcttgtggatgcgcagcggctcctcaatggaacggaagatggagtacatcgggtcgagcgaaccgtaggggttctggaacaccggctgcacgtggcggcggaagcccagaaggtccttggacttgaacgtggaggtgtcgcgaccttcatagaacactttgccggaggtgggcttcaggaggtgaagcaccatgttcgccacggtggacttgccggaaccggattcgcccacaatggccagtgtggtgccacgcttgacggagaaggacacgtcatcgacggccttgaacatctccttcttgcggggcagcttgaattccttggtcaggtggtcgacggtgatgatgtgctcgctcttttcgagcgtgctttcgccggcgatgtggtgatcgagcagagcgtccgcatcctcaccacgctccttggcggagatgatgcgctgggaggccagcgacggggcagcggccaccagtcgcttggtgtacgggtgctgcgggtgctggagcacttcaagggatgggccggattcgacgacctgacccttgtacatcacgacaatgtgctgggcgcgctcagcggcaaggcccagatcgtgggtgatgaacagcacggcggtgcccaacgagtcggtgagcatgtgcaggtggtcgaggatgcgcttctgcacggtcacgtcgagggcggaggtcggctcgtcggcgatcagcagatcggggcggcaggccaagccgatggcgatgagcgcgcgctggcgcataccaccggagaactcgtgcgggaactgacgggcacgggtagcggcgtcgggcagaccggcctcggacagcagacccgcgatacggtcatccattgtggagccggtgacgtacttcttagccagataccaggcctggtcgtcggccacgccggccttgatgaggtcgtcggccacgcgccaacgggtttcggagcccggaacccattcgttggtgaagcgggcgacggccttgtcgaaggcctcgccggacacgccggcttcagtcaaagccttcttggcctcggtcatgagctcgggcagttccttggcgccgaggaaggtctcgtcgtcgttgcccttgacttcgacctcgtcgccggccagagccttggcaagggcggagcgcttttcgtgagccacgtccatgttgttggccttcagtgcttccttgacctgggtgccgatacgccacaccgggttgaggttgctcatcgggtcctgaggcacgagacccatcttggtgccgcgcagcttgtcgaactcgctctgcttggcgccggcgatttcctcgccgtcgagcttgatggagccgttgaccacgtgaccggtgccgggcagcagacccagcacggccatggcggaggtggacttgccggaaccggactcgcccacgatggccacccactggccagggtagacggtgaagttggcatcgcgcaccgcgtgcaccggcttgccggtgtcagtggtgaagtcgatggccagatccttgacctcgagcagcggaccatgctctttctgcatagccagcatcttggcgttggtgttgtcagtcataatgtttctccactcccctcgctcaggccgtacggctcttcggatcgagggcgtccttgacggcgtcgcccatcatgatgaacgcaagcacggtgatggccagtgcggcggacgggtagaacagcaccagcggatcagtctgcaggttggtctgtgcgctggagatatcgccaccccagctcaccgtggtggtcggcaggccgacgccaaggaagcttagggttgcttcggccacgatgtaggaggccagcgaagtggtggcgatgacgatgatcggggccagggagttcggcaagatgtgacggaacaggttcctggcaggcgtggagccgagggccgtggaagcggtgttgaattcgaggttcttcgattccagcacggcgcttcgggcgatacggcatacgccgacccagccgaagagcgtcagcaccagcacgatcttccagatggacttggaggtcttgaacatctgaagcaccacgatggcgccaagcagcataggcagcgcgaagaagatgtcggtgatacggctcagcaccgcgtcgacccaaccgccgaagaagccggcgacggcaccgatcagggtaccgacaatcacgaccagcagcgtggagagcacgccgacggacagtgaggtacgggtgccgtagaccacgcgggtgtacacgtcgcagccctgcaggtcgtagccgaaggggtgtccggcggaggcggggctcaaggagttgcccagatcgcaggcgttcggatcctgcttggtgaacagaccgggggcgatggccaccacgatgatgaacaggatcagcaagccggagatgatgaacaacgggttgcggcgcagggttcgccatgcgtcggcccacatgctggtggccggtgcggattcgtcgacggaatcgacgtcctgcaacggggtctcgtcgagaggagctacgtaacggtcctgaccgggcagggtttccatgaagtattcggttcctggctcgccggtctggttgagctcgttttcagtggtttcgtttgccatgtgactcactcctccctatcacgcgtaacggatacgcggatcgagggccgcgtacagcatgtcgacaacgaggttgcacactacgaaaatcagcatgagcaacgtgacgatggacaccaccaggtttgcctcgcccttcagaatggactggtaggtgaggaagccgatgccgtggatgttgaagatctgctcggtgatcatggcaccacccatcagggcaccgatgtcctggccgaggtaggtgacgactggaatcagggagttacgcagcacgtggcgcagcatgacctgaccgttcgacatgcccttggcgcgtgcggtgcgcacgtaatcctcggcgatgttggaggagatttcggagcgggtcagtcggatgatataggccatcgacaccgaaccgagcaccatggccggcatgagcagatcaaggaagccggggtcggcgcctgccgtcaccggcaatatcgcccactgaataccaaagacatattgcatgacgaagccggtgacgaaggtcggcacggaaataagcagcagagagacgatcaggataacggtgtcgtaccacttgcccttcttgaggcccgagataatgccgaagaccacaccgaaaatcgcctcgaacacgaacgccatcaagccgagcctgatggtgaccgggaaggcgcgggtgatttcgtcgagaacgggctggccggcgaaggtatcgccgaagttcagggtcagtgcattcttcaggtagatgaagtactgaacgatgaacggctggtcgagatggtattctgcgcggatctgggctgcgacggcctcattgacaggcttgtctccgaacatggccttgacggggtcgcccggcagggcgaatacaagggcatataccagaagagtcgtaccgagaaccacgggaatcatctgcagaatgcgtcgcagaagatacttacccatacggttgctccttatttcctagaccggccagaaagggtatagtacgcccccgccggtcgataaatactccgacagtttaccgcatgcccggactgtgatatgtaaatttgcgttaacgcaaggtttgagattgggcaatgctggtggatatgtccatggttgcggtcggatagtggatactttaacttggttcccgatggcgtgagcaagcaccccgcacacaacaaaaagggcggggatcttgcgatcctcgccctttatttccgaactacctagcggtatccgttcagtgagtcagactcacttcttggacatctcggtgtaggtcgggaggttctgccaatcgaaggcgtagccggacttcacgttgagggaagccacaccggaggcgttggagtagtacagcgggatggccggaaggtcgttgaggaggatttcctcagcctgctggtacagcttgttggcgtcatcagtgctggaagcggcagcagcctgcttgcacaggtcatcgaaggccgggctcttgtagtcaccatcgttggagccgttgccatcagcagcagcggtggagtacagctgccacaggtagttctcggcggacgggtagtcaggctgccagccggtacggaaggcgcccttcatctgacggttggtgacggcgtcacggaattcctggaaggtcgggatcgggttggtggccgcgtcgatgcccaggttcttcttgagctggttcacgacagcatcgtaaatcggcttggcaccaccatcggcgttgtaggagaaggtgagctggccgtcgtacttggagatggcgtcagccttggcccacagttccttggccttggaggcgttgaacttcaggttgtcggcacccttgagggagtcagagtagcccggggtcttcggggaggtgaactcggtggcggcggtggcgttgccgttgagcaccttgtcgatgagctggtcacggttgatggccatggagatggcctgacgacgcagctggccttcctcgtcgttcttgaagtggtcaagggaggacgggatggtgaaggtctggataacggagccggcctcggagtaagcctggaccttcttgtcggtcttgaaggtcttggtgaaggcggccgggacggaatccatcacgtcgaggttgccgccctgaatgtcgcggtaggcggcggagtcgtcggtgtagaccttgaaggtcacaccgtcgttcttgggctgctcgttacccttgtagtcagggttcttgacgagggcgatttccttgttgtggtcccagtggtccagcttgtacgggccattggagacaggcttctcgccgaaggccttcggatccttgtagaaggactcaggcagcggggcaaaggccaggtagccgaccttgatcgggaacacggagtcggactggttcaggtcaacggtgaaggtggtgtcgtccacgaccttgaggccggagagctgctcgtcacccttcagaccatcagcctggagctcatcgtagcccttgatggtggagaagaaggaggagcacttctgggcgttcttgacgttggccacgtaggaccaggccttggtgaaggactcggcggtcaccggggtgccgtcggtgaacttccagccggacttgatcttgatggtgtactgggtggcgtcatcgttcggggtgatggactcggccacttcgttggaagccttgccatccttgtcgaaggagaccagacgggagaacagcaggtcacccggcttgccgccaccggtctcgttggtgttgcccgggatcagcgggttctgcggttcggagttgtacgcagtgatgatgttggagccagcggtgtcaccggaggcagcgttactgttggagccgccgcaggcgctcagcagcatggccacggagcaagccatggcagcgaaagcaagagctttcttcttcatatgatttctcctattcattaggttgcgaagcgtttcagcctcgcctcatgcgaacggggtcggatttcctcatcgtcgggacacttacgcttcccgccgcttcggacacccaaccccgttgctgttacctgtcatttttgcgcacttgggagacaagcagcgtatttttgttacacccatgtaaaattcgggggcttttaccggctaggttcagtctttgctaagtttgttaaccaatgcccacatagtggtcatgcccggggaaaggcctgtccgtaacggttcttgagctgctcgatggagacgtgcgtatagcgttgtgtagttttcaaggaggaatgcccgagcatctcctgcacctccctcagatcggcaccgccgtccagcatgtgcgtggccgccgaatggcgcaacgcatgggggctgatgtccggtacgccggcctctcgggccgctctgtgtacgatgtcacgggctatgcgttggtcgatacggccgcctcgtgcgccgaggaacagggcgttggtagcacgggacttggctgcatccgttgccgtacgggccagtacaggccgcccttgttcaagccaagtctccagcgcacgctgggcgggcagtccgaacggcaccacgcgttgcttgttgcctttgccggtgactttgatggtgcgattggagaagtcgacgtcaacgatatccatcgacaccagttcggcgacacggatgccggtggcatacagtagttcgagaatcgcggcgttgcgctgcgattcggcgacgactcgggcgctgtcgcgcttgtctgcacgggcgggtgcctcgttgcggtttacggtgtcggctgacttatcagctgtcttgccgactgccttgccgctgccactgccggacgcggctgccgctcccccatcgcccttgtactggtttgttgcaacggcctgttcggcgacatccaataactgctcagcttgagattcggtgagcaccgcgggcagcgtgctgggaatcgagggagtcatcagtgtggcggccgggtcggtgttggtcaccccatgctcataggcccacgcgaagaacccgcgcacggccacggttttgcgggccatgctgctgcgggcgtgatcgcgcgattccaccgccatccagctacgcagatcatccagcgtgatctcgttcagatcggtcacgccgcgcagctcgaacaggtgcagacatgccgtgagatccgcgcgatacgctttgagcgtattcgctgacaggccgcggttggacttcagataggagacgaaggagtcgatatcgccgtcgaactgcgtagatgacactctcgttctcctccgaattctttatggccttgggttacggccggggtggcgtgttgcgccgctccggcacgggtttcaatgtggcaatctgttcctgatggatggtcacgttctgggccgggcgcgaaccattggcggcggcgtcacgcaccatctccaacgtgtatccgtcccaggaaaccacgtgacccacatagtcgcggaacttcatacggtggtcgaccgggtcaatgccgtcggtgatgcgcaccaccacgcgggcaccggccggaatctgccttggtaacgtcatacgtcatcatcccccttaaccattcgccgcatcaacttcgatgcgtttcccggaaaacggtacagactaccttactcctttgagcctttcgaacagcggagccacacggtcttctcacgaaaacaagcgggaacttcatccccctcgcgcggccttcttcgtgacaggcggcgaggggaacctgcgcacgggcctacatggcggtacgcagttacatggcggggcgcagttggatgatggcctgacgtggatggacgaagccggtgatggcttctcctcggcgtgcggagaacagcagggtctgctgccagccggcttcggggacggcgagctcgcgttccgggaatccggcggcagttgtgccggcttgcggcgcagcggtggccgtaccgtcttgtgcagcggtgatgccggcatgtgtcacggcggccttgtaccggcggaaggggtcgccttcggcgaagaatcccatcacatcctgctcgccggcggcaccagcgtgcagttggtcggccatatcggtcagacgtgccgccatgcggcgcagcagcgcttcgacgttcagcgagtcttcctcgaccatcgcgcgcgtgcggtccgggtcggtcagggacacgcgggtcatgtccctccagcagccggcggccagcgcggcggcgatgttgcggtccgggttggcgaccagttcgttgatcagcgcggtggacaccacatgcggcatgtgggagatcatcgccgcggccttgtcatgcgtttcgtcgtccacgacgatgacgcggttgccgacgtccttggtgatcatcgcggcgacgtcgaggaagcggcggtagtccgtggactcgtccacggtgatggcccatagggcaccgtcgtacagatgcgggtcggcggcctgccagccggacagttcgttgccggccatcggatgggcgccgacgtagcacttccccagcccggcagccttgacctgatcgcggaccatgcccttgaccgagcccacgtcggtgagcgtggtgttcggatggtcgcccatgagcggggccagggcggcgaggattgcgggcatcgccttgagcggattgcacagcacgaccacatccggctcggcatccatgagttcggagagcgtgctcttgcagaaaatgccatcggcttcggcctgggcgtaggggtgcgggcgatggttccacgcgacgacgcgcacgccgcgctcggtcaggcggcgtgcgagcgagccgccgatcaatccgagtccgacgattccgactgtatctaccacagcagttccttccttgcttcctcggtgtactgccagccttccggcgcgcgattggtgatgtggacgccgccctcgggcagcatccaggcgtcgaccggcgggttcgggcgttcgcggcgtgggtagacggccagggtttttgcccagtcgccgtgtccggcgatctcttccagtgcggtgcggaatctcggctcccagggggcggcgtcaagggtggcgatgaagctgtaggttccgtcgtggcctttgatcgggcgcgagatgaagctggtcatgttcagtcccgcatcgcgcaggacgtccagcaggtcggcgagtacgccggggccggtgaccagcgggatgaaggtgatgatggtttcgaagtcgccggcgtcattgctgtgggcgcgggcgttgagttcctggaccacatcacgcggggcgatgacaaggaattcggtgtgcgcgccatcgaaatcctgcacatgttcggcgagggtgtcgagatcgtagagttcgccgcagatgctggggccaagcgccacgcggccgggcttcaggtcgcggcaggcggcggcgttggaggatgcgggttcgggctgcaaatggtgttcggtgatgaaccgggtgcattgggccaggccgtgcgggtgggcgctgacggggttgccggtgcagtcgcagatgctgtggccgcgcacggtgaaggcgttgaaggccacgtccacactgatccgggcgaagccggccgcgtcgggggcgtcgatcagcgcgtcgagattcgggaccacatagccttcgacgttgttttcccatgcgatgacgccccagccttggcgcgactgtacggcctgcatgatcgcgggcacgtcgggcagggcggtgaggtcgaagtcgccgagtgtggcgaactggtcggcggccgtcattgccgcctgatgggtgaaggtgccttccgggcccaagtaaaacagtttcatgcgtgccataaggttctatggtagcggccgtaatcccctacgcccgccgatacgcgacgcattcccggaaacgtgccgccatatatagttacgcgcgcgattcagaatgagtgggaataacgaaccagcgggcgggaagaatgagcaggacgacttggaccagtattaggccgtacagccagatgtagccggcatgctgggagaagaacggcatgtcgccttggaatccggcgacgatgaccgccttgccggatgtggtggtcagtgccatgccccatgcggtcagcgaggaggcgatgaggtgcagggccagtccgaccgcgcccatgcgcgaacgggcgcaccatgtcgataggccgatcagcagaaatgccagcaccagaccatacggaatactcagttccgcacccatacggtgggcgaacgtgcccacaaaggcggaagccacgcccgccgcaatcgtgatcaacgatttgaccagcgcgttctggcgatacgaccacggacgcagttcagtagtgctcttcacagtcatgcgtttcagtataggtggggatatgacttggcgaggaataaacttggctcccctcagagaggggagccaaggagaatggtcggctacagtcgcaccagatcacttaccctgctgggcggcgttctggcggcgctgcttggcgcgccacttgtaccagtcctcacggccgaggatgatcttgcgcacgcggatggactccggggtgacttccacgcactcgtcctcgttggcgaagtccagggactcctcaaggctcatcttgatcggcggggtcagggtttcgagcacgtcagcggtggaggaacgcatgttggtcatgtgcttggccagcgtgatgttcacatccagctcgtcgggcttgttgttcacgcccacgacctgaccctcgtacaccggggactgcggttcgacgaagaagttgccacgggcctgcagacgctgcatggcatacggagtggccacaccctgacgatcggaaaccatggaaccgttctgacgaatggtgatggcaccagcccacggagcatagccagcggagatggaggaggaaatgccggtgccgcgggtggcggacagcagagcagtgcggaagccgatcagaccacgggacggcacggtgaactgcagacgaacccagccggagccgtggttggtcatgccgtccatacggcccttacggtcggccatgagctgggtgacggtgcccatgtactcttccggcacgtcgatggtggtattttccatcggctcgttgaccacaccgtcgatcttcttggtgaccacctgcgggcggccgacggtcagctcgtagccttcgcggcgcatctgctcggcgagcacggccagcgccagctcgccacggccctggacttcccaagcgtcggggcggtcggtgggcagcaccttgatggacacgttaccgatgagctcgcggtccagacgatccttgatcatgcgggcggtgagcttgtggtccttgccttcggtgccggccagcggagaatcgttggtgccgaaggtcatggagatggccggatcgtccacatggatgagcggcagcggcttcggatcgttggggtcgacgatggtctcgccgatcatgatgtcgttgacgccggcgacggccacgatgtcaccggggcctgcggactcgaccgggatacgatcaagaccctgggtgcgcagcagttcggagacgcggaagttctcgagggagccgtccacacgggacaggccgtaggtcttgcctttctcaagggtgccgttgtagatacggaccagaccgagtcggccgaggaagtcggaggagtcgatgttggccacgtgagcctgcagcggggcgccttcctcgtattcgggggccggaatggtggagatgatggcttcgaacagcggctcgaggttgtcgttgtccggcaggccaccgtcggcgggctggttcacggaggcgtagccggccttggcggcgcagtagatgaccggcatttcaagcagctggtcaaggttcaggtcgatgccctcgtgctgcacgtcgtcggccaggccgagcagcaggtcggaggtttcgccgacgacctcttcgatacgggcgtcggggcggtcgaccttgttcacacacaggatgaccggcagcttggcttcgagggccttgcgcagcacgaagcgggtctgcggcagcgggccttcggaggcatccacgagcagcacgacgccgtcaaccatggagatgccgcgctcgacctcgccgccgaaatcggcgtggccgggggtgtcgatgatgttgagggtgatgccctccgggtggccgtacttggcggccagcggaccggcgtattccacggccgtgttcttggcgaggatggtgatacccttctcgcgttccagatcgttggaatccatcacacgatccggcacttcctcacgctcggaaaacacgtgcgactgctgaagcatggcattgaccagggtggtcttgccgtgatcgacgtgagccacaatcgccacattacggatatctccacgaaccgccatcgaaacctctcttaatactgattttcttgcgtaatcgttcggtacttgcgttctcgagtacttgctcttggatatcaacctgtacctacacacaaaccgtcacgatgttactggcacaccttgacacacaacgggcccggctttctgagaattagtcacatgtcatctggcttgcgagactttttgtattccacactctcgactcccctccctgaggggagctgtcgccgtgggcaactgaggggcgccaagtgtatcccctgaatctcccctgaatcatccctgagtacagcaccgtcatgggtagttactgagtaacctgatatccaacgatagttactcagtaaccttcgcccaaggcaaaccgtctatgcaaaggggatgcggtatggcaatcagagaagcgctattagcactgttggagcgaggcccggccagcgcctatcagcttaagaaggacttcgaccgcaccatcggtctgacttggccgctcaatatggggcaagtttccactacgctgcagcggttgaaccgcgacgggcttattgaagagaccgcgccgactactagcggatccaatgatgtcggcaccgcagcggccgcaccattatggcgattgaccaattccggcgcccaagagcttgaccgatggtggcgctcccctattaccccggaacaacgcggacgcgacgaactggtgatgaagctggccgtcgccgtggaaatacccggcctcgatgtttccgaactcatccaacaccaacgccacgctttgcagcaactgctgcacgacatcacccgactgcgccggcaaacaccgcccaccgaactcgccacacgtctagtactcgaccaccacattttcatcactgaagcggaattgcgctggctcgataccgtggatgagacccagctgcgagcacaactggcgcagcaccccgtttcggcacctctcacggcaagctcagccgcactcaccgccaccattcaatagtgcataggagcacatcatgacttctcccgttctttcttctctcccgcaatcttccccatgcgcgctggaattacacgacgtcactcgcgttcacggcaaagatgcacgtcgtgtcaccgcgctcagtcacgccaatctcacgcttcgcccgggtgaattcgtggccatcatgggccccagtggttccggcaaatccactttgctcaatcttgcgggcgggctcgatgtgcccacgcaggggcacgtgctggtcgaaggccgcgatctggccacactgtcagtggccgaacgcgcggccatccgccgcaaatcgataggctacgtgtttcaggatttcaatctgctgccttccctgagcgcagccgagaacgtgtcgttccccttggaattggatggctggaatccccgcaaggcacgtgaggccgcggtgcaatccctcaatgaagtgggagtagccgatatggctgatcgccgacctgaagacatgtccggcggccaggcgcaacgtgtggcgattgcccgcgcactggtcggcccacgccgtctactactggccgacgagccgaccggagctctggattccaatgccggcatgacgattctcgaagtgttgcgcacccgcgcagatcgcggcgcggccgtactgctggtcactcatgagcctcgcttcgccgcctgggccgaccgcacggtgtttttgaaggacggccgtatcatcgatgaaaccggctccagcaatatggatgatttgctcaaccttgaggaaaggggagcatgatggcacgcgcagccctcaataatcttgccaatgccaccgccggccgctctgcccaaattccccatgccgctaggccaagccttggcgcacgttgcaaccggtatcgggccgcgctgcgactcggctggcgcgacgcactacggcacaaggcccgcaccctactgtccttgctgctggtaatgctgccaatcgccgcaatggtggcctccatcggtatgaccaccaccataccgcccaccagatcgcgtgcgctggcgacaatcccggctgatacgcaggcggtcatcaccgccaccgccaggccccgcaccggccaaccgttccggcagtcacccgaaagcggcggcatgtggcaggacgatccctcccagcagccggcctcggccgccgagcttgcgaagattctgccgcaacaggatcggctgctcccgtattggcagtcgcccgaactcatcgccaccaccggcaccgcgttgcaacccggcgaacagaccaaggctgggattgacgtgaaaagcgggaacgacattgatctgaacgcggcctccaccgcgaccatgaccgaggcttcacctgaggcattgcaacgaatgttgccgaagctggtcaagggttcggcgccgcagaataatacgcagattgtcatcagccgcacattggcggataatctcggcgcttctctcggtagcacggtgacgttcgtcgctccgccgttcgatggctggatgagcctggacgggcgcatcggcgaggcggtggccgacactcagcgtgcttggacagtcagcgggctgaccgatgaatccgaagccgcggcatggggcttggaaggctggatgtcagccatattggaatctgatggcgtcggcgtggatggccattatttggtggtcggtccagagccggtcacgtgggcgcacacccgcagcatgaacctgttgcaggccatcgtcatttcccgccatgtgctgactgacggctatccgcccgcatcgcagctctacccgatgcagatcgatgcggctaccatgttgaaccacatggtcaccgtggtcatcaccatgctggtgggtatgctgctggtactgtttctggtcacgcccgcgtttacggtgtcggcagatcagtcacgtcgtgtgcttgggctcgcggccgcatccggtgctgcaccacgtgacctcagtcgaatcatttcctcgcaaggtctcgttatcggcgccatcggtggcgtgctgggctcggcattgggattcgcgcttaccttggtggccggccctgcgataggtgcattgcacggatccacgccgctggagatcctgcacggattctcgtggagctcgctgccgatgggtattgtcacggcaatcatcattggatttgccgcgacgattgcgccggctcggcatgtggcgcgtatgcatccagtcgatgcgttgaaggatcgcccgacaagagaggaaatcggctacggtgaatccgcgaatggcgtggatacgaagcttcgccgtaatcctttgagactgctccgtgttgcggttggtccgattctggtcttggccgccatcgtatgcgccgcgctcagtctgacattgccattgcccacgctggccgatcacaatccgggcgcggttccggccggaaccgaagcgcatatggctctgcttgttgccacgattttgttggctgtcatagggcttgcgttgtcgattcgcacttttgcacggtggtgcggcaaagcgggttcccaactgaacatcggcgcacgcctggcactcagggatgcagccgagcatcatcgacggttcgttccggcggcatgcgcggtgctgattaccatgtgcatcgcctcgtacacactggtaatcaccggctccatggtggcggaccagcgaaattccacgatgacgatgacgtatggaccatcggggatggccattggggccgacgtgcatgtcagcaatgagttcgaccgtgctgtggtgtcggatgcgatacgccggcttggcaaagagacgccgatacgcgctcattacccggtgtacaccgaggatgtcaagcgatggtcaaagctcaatgatacgaccgaagtcgattccgacaagttgaacgccgaacacggctacatgtatgccgctgcattgctcccggccggtcacacttgtgataacccaacgatccaagagcaaccggacacgtccacatgggtgggccaggatgccgcttcggccctgtatccaaacgttccgatacgttgtgtgccgatagaccgatcccatcagccaacgtattcgaatatactgtcgagtttcagcggcgtgaatctcattatggatggcaatgcgatgcgtttgtccggcttcccgaacgcggatgaggcggcacaggtgcttgatgcggacggtgtggtggtcggcgatgccggcacaatcgacgcgggaggtatggtgcgtgtggccatttcgccgaatccggcaattgcaaacgaatctcaggccacacatatcgagaagcgcaaggccatctacgtgcgcggcgcgtacccgctggtgatgagcccggcaacagcacaggcgctcggcatcaaacaattgcggtatctgggtgagtatctagacttcgccggtggcaactcccccgttaccgtaaagaaggcctcagcttatgcaatcgaaaatctgccgctggcatccacgagcactgacggaaatcgcctgccgtggggcgacaatatggcattggtgcccattggcctgttggcattgctggcactgatggccacgctcgtttcactgctgctggcccgcacgcaggcccagcgcgacatggccacgatggtcgccgtgggcgcgccaccccgattcctcagacgttacggcctgacgcaggctgcggtgattctgctggccggcgcgccagtgggcgtggtatccggcgtggcgttgggatggctgcatgcggcatggaaccgcaggatcggtgtggacggtcattggctggaaaccgtgccgatctggggattgcaggcggcgctggcattcggcgtagtggtaaccggactgctggtggcgtggctggtcacaaaaccaccgcgcaatctcacccgtcgttccctcgattgatcagtgacatacggcaacccttgccgtgtcattcgggagctataagacaaaaagtggcccacacattggtgtggaccactttagtagcgaaggctgaagtgtaatcagtcttcgagattgaggcctttgcgctcgggcaagcagagggctgctatgcaggcgaggatgaaggcggcggcgaagatgatgaaggccacggccttgttgccgccggacagggtcaggaaccacggcatgaggagcggcgcgatgatggcggcgatgcggcccaccgctgcggcggcaccggcggccgcgccacgcaggcgggtcgggtagatttccggggtcacggcgtacagcacgccccacgcaccgaggttggaggcggacagcagcatgccgaacacgagcacgagggccacggatccggcctgcgagaacgcgaaggcggccacggcggagacggccaggaagatgctcagcgtcttgcggcggccccagacctccaccagccaggcggctaggaagtaaccgggcagctgggcgatggagatggcgagcgtgtagccgaatgacttggtcagggagccgaactggtcggcgagcagcgacggcatccatgtgaacgcgccgtagtaggagaagttcacgaagaaccacgtggcccagatggcgatggtgcgggccaggtacttggagccgaacagttcgcgcgtcttgatcttcggcagcggcttgcccttgggagaggcgaccggggacactcccccggcttcctcgaagtagcgcacggccttttcggcttcgtcttcgcgacccttggcttcgaggaatcgcacggattctggaatgtgcacgcgggtgacgattgcgtagagcagtggcagcgcgccgatggccagcgcccagcgccagccccagtcgccggtgttcgggatcacgaagtagccgatcatggcggcgacgatccagccgacggcccagaacgattccagcagcacagtcatgcggccgcgctgtttggtcggcgaaaactcggagaccagcgtggaggcgaccggtagttccgcgcccaagcccagtccgatgatcagtcgggcgccgagcagcatgccgagtgaccaagatagggccatggcaccgttggcgatgccgaagataatcagtgtggcggtgaacacggttttgcggcccacgcggtcggcgatgaagccgcccactgccgcgccgatggccatgccgacgaagccgatggacagcacccatgacttttcggtcggggtgaggttgaagtgcgggtcggctgcgatggcggcgactacgaaggagacgaggccgacgtccatggcgtcgaatgcccagccgatgccggaggcgacgaggagtttgcggtgcgccttgttgaagggcagccggtcgaggcgctcgttgcgggtgagctgcgcgggttgcgctgaagtggtggtgctcacgtcgtttcctttctggtaagtggcgtcagatttaatggcgggtcaggtcggtgtaggactcttcgatggccaagctgatgcgttcgacttgttcgcgggtcagcggcttgcggaaggtcatgcgcaatgccgatttggcgatggacggttcgaggcccatcgccagcaacgtggcaggaatctcgtggcgctcgatggcgcaggccgagccggatgaggcagcgatgccgcgcgcgtccaggtcgacgagcagcgcttccccggtgacgccggggaagatgaaggaggcgtgaccgggcagacggcgttcggggtcgccggtcaggtcggcgcgaggcgcgatccggcgaaccgcgtcgatgagcatgtctcgggacgcgaccaactcacggtactgcgcctgcatgcgcgcattcgattcgttgagtccgatggcgagcgccacggcaccggccacgttctgcgtgccagagcgcaggccgcgttcctgcccgccgccggacagcaccggttcgatgggtgtgcggccgcgtaccagcagcgctcccagacctttgggggtgccgaatttgtgtccggatacggacagggcgtccacatcccagtcacgaaaacgaatcggaatctggccggcggcctgtacggcgtctacatggatgggcacgccgtgcgcgtgggcgatgcggaccagttcctccacgggttccacggtgccgacctcgttgttggccagcatggtggagaccatcgtggtacgttcgccggcctcgccgtcgagctcgcgttcaagtgcgtcgagatcgagatgcgcttgcgcatccacgggaatgcgcacgacttcgaaaccgaaccattcgtgcagccatgccgccgattgggccacggccgggtgctcgatagcggaaatgataatgcgcgggcgacaatttgccggctgttcgccatcggcttcggcgaatccgtagaccggccgcaagcccagtttgcgcatgcacgccatggcgatgcctttgatggccagattgtccgattcggtgccgcctgaggtgaagatcacgtcatccggccgggcgcccaatgccgcggcaaatgatgcgcgagccgcgtccagcgcgcgggccgcggttttgccgggctggtgcacgctggccggattggcgtaggcctcagtcaggaacggggtcatggcctcgatgactgccgggctcactgattcggtggcggcggcgtccaggtacagttcgccgggttcaccggatgcgttgggggtatcggccatgactagttccaatccaatccgaggtcgatgctgcgcacagagtgggtgagcgcgcccacggagatcacgtccacgccggtgacggccacggctggcactcgctccaggctcatgttgccgctggcttccacgatggccttaccgtcgatgagctccacgccgcgacgggtgtcgtcgagcgagaaattgtccagcatgatggtgtccgctccgccggcgagcacggcgggaatctggtcaaggcggtcgacttccacttcgatatgcgtggtgtggcccacctgttcgcgcacgtggcggatcgcgccggccaggtcgatgccgcgcgcggcgagcgccgccagatggttgtccttcatcatgaccgcgtcggacagtccgtaacgatggttgtggccgccgccgcagaccacggcgtatttctcgaacgggcgcaggccgggcgtggttttgcgcgtatcgacgatgcgggtgcgctcgtagcggcgcggccgggtgacgggtccgtcataatcatcgccgtagatggcgttcaccgcgtccacgaaggcggcggtcatggtggcgatgccgctcatgcgctgagtgaagttgagggcgatgcgctcggcggtgagcaggtcgcgtaccgggcctttcacggtggcgagtatctggccgcgctggaatcgctcgccgtccttgatggcggcggtgacggtgacggccgggttctgtgcggcgaaggctgcggcgaacacgtcgatgccgctcatcacgccgttttcgcgcgcggtgaggtgggccgagccggtttcgtccgcggggatggtggtctcgcaggtgatgtcgccgtagggcgcgtcttcggcgagcgccgcttcgacggcgacgcggatgatgtgtgatgtgagcatgggtcagtccttgatgtaggcgacggagtgggcccagttgtcgactggctcgctgtggtcggtgcgggcgtgggcgcctctcgactcggtgcgggcgagcgcggcggtggcggccacatagcctacggtgagcatgttgcggttctccaaagcctcaacgctgcttgcagcaccatcggcgtttacatcagcctgggcgtttgcggcggcgaggccttggccgagttcggcgatggcggttttcagtccggcctcgtcgcgcagcacgccgacgccatgccacatggtgttctggatgcgggtacgattccacaccttgtcggcggcggtatcgtcagcagcagccgtagcggcaggggcggccagcgcgatcggcgcatggtcgaacacggcaccggtggcggagttcaggaacggttcgggtgcccagaccgcgtcgtcaccgtccgcgacggcggccagaccggcgcggcgtccgtagacgagcccctcgagcagcgagttggaggcaagacggttggagcccatgacaccggtacgagcgcattcgccggccgcatacaggccgggaatggaggtccgggcgttcagatcggtgcgaatgcctcccatgtagtagtgcgcggcgggcgccaccggaatcggctccttgctccagtcgaagccaagcgaacgcgtataggcgtcgatggtcgggaatcggtgggccaggaagctggccaggtcggggttctcgcgggccatcggcgagacgtcgagcatcacgggcttgccgccttgcgcctgcatcacgcggaagttctcgcgggccacgacgtcacgcggcgcgagttcggcgcgcggatcgatgtccttcatatacctgtggccatgctcatccagcagcaccgcaccttcgccgcgcacggcttcggagacgaggaagtgctcgcccacggccatggcggtgggatggaactggtagaactccagatcggcgacctgggcaccggcacgccatgcgacggcgaggccgtccgcggtggcgaccggcggattggtggtgtacgggtacatacggcctgctccaccggcggccaagatcacccggtcggcggccagatccttgtcctgcccgtcgatcagcaggtggacgccggcgatgtggccgccccgcacgatgagatctttgaggaaggcgttctcgatgatgtggatgcgcgggttcttgcgcaccatggcggagacgtccagttcaaacactttgccggtggcgtctcccccggcatgcaccacgcgggcgcgcgaatgagccgcttccaggccgcgcagcatgtgtccatgcgcgtcgcggtcgaagtggacgccggccgcggcgaactcgcggacgcgctccgcaccctcacgggtgaggatgtccacggccttcgggtcgcacaggccgtggcccgcggccatggtgtcggcggcatgcagcttcgggtcgtcgtcggagaagatggctgcagcgatgccgccctgcgcatgataggtgtttgattccaccagttcggccttggttaccaaggtcacgtcgtgtccggtgccggccacggccagtgccgcggacagtccggcgacgccggcgcccacgacgacgatttcagtgttgctcattgtgttgctttcctctgtttttgcgtcatctgctcccttcagtccgctacgcggacagctcccctcatgtacgaggagcgccagggacgaatcacgggtgaacgcgcagcatgcgctccagtgccaccttggcttcgcgggcggtgtcttcgtccacggtgatgcgattgaccacgttgccggcttcgaggttctccaaagtccaagccaggtaggccgggtggatgcggtacatcgtggagcaggggcagaccacggggtccaagcagaacacggtcttgtccgggtactgcgcggccagacggttcaccaggttgatttcggtgcccacagcaatggcggatccggcgggcgcgttggcgatctccttgacgatgtacgcggtggagccagtaccgtcggcggcatcgaccacctgcatcgagcactcggggtgcacgatcaccttgacgcccgggtatgccttgcgggcacgttcgacctgttcgacggtgaaacgctggtgcacggagcagaagcccttccacagaatcatcttggcgcgggcgtaatcggccggatcggcggcgccgccctgtgccttgaacggatcccacagcggcatctcgctcagcggaatgcccatcgcgcgggcggtattgcggcccagatgctggtccgggaagaacagcacgcgcttgccgcgggcgaacgcccattccagcacggcgtgcgcattggaagaggtgcatacgatgccgccgttgtgtccgcagaacgccttcagcgcggcggatgagttcatgtaggtgaccggaatgatctgctgcaagccatcggagtccggctgggtgccgcagatctcgccgagctggtcccagcattcctggacctggtcgatgttggccatatcggccatcgagcagccggcggacaggttgggcagggtcacgctctgttcgggcgtggagaggatgtcggcggtttcggccatgaagtgcacgccgcagaacacgatgtggtcggcgtccgggcgttcggtggcgttcttggccagctggaaggagtcgcccacgaaatcggcgtgcttgatgatctcgtcacgctggtagaagtggcccagaatcaacagtttggagccgagacgctgcttggcgtcggagatgcgctgctgcagttcctcgtcggaggccttgcggtattcgtccggcaacacctgctggcgcggcgcgttggcgggcagacggtcgagcatcgaggcaccgggaccgtagctgggtgtggtggtgtcgaagtgccatgggtcctgggtcagtcctgcatcgcaggtgctttgcgcgcccagcttggcgatgatctcgtcaacggacggcgcagtgaatagtgcggtcatagtggttcctttcctatatacgtctgtgataccggcccgaagcgggtcggcgggaaaaatcagatgcgcgcggatgggatcagcgcgtcgagagcgtcttcacgctcgccttgtctggacagttccacgatgtcgtcaccatcggattcgtggggcgtaccgttctcgacaggtcgtttggggatgtagcggtagacggtggccggtcgttggcggccttcgcgcatcttctccccggtgtcttcaaggtcgcccgaggcaagcattttgcggcggaagttcgccaagtcgaggggttcgccgccaatcgcctcatagacgccgtgcagttggcgcagggtgaacgtggggccgagcagtcgggtggccacgtcggagtattcgattttggagcgcaggcggagcagcgcgtagtcgatgatctggcgatggtcgaacgccagctcgggcagttcgtcttcggggaaccatcgtacgttgtcaccgtcctcgaagcccgcggcctcggtctggccgacgagcgcccagtacacgacggacaccatgggcaatccgccatgggatcgggtcgggcctccaaaggtgtacagctgttcgaggtatcgcgggtgcaggtctgtggtcgattcgagggccgcgtaggcagactgttccaacgaccggtcggagcgcaggtcaccgccgggcaacgcccagcagcccaggaacggctgacggacgcgcttgaccaggggcaaccagagacgggaatgggccgagttcgcggcattgccggaatcggcggcactgttgccggtatcgccttccgggccgagtgccagaatcaccactgacacgccgacctgtggcggtgcgctgcggcgctcggacacattgccgaatcccatgccatgcctctttccataccggttgttctccctgcattgagagcatagcactacttatagtcacaatgaccataaatcacatattggatggtccagcgcacgaatattggccaggtagcgggccccaatcgctacgaaatcacgtccgtatcttccgatttcgactgtgtcatttcggcgacggacgggaggaacggcgctagggagggtagttcgtcgagactcttcaggcccatttggtcgaggaagaattcggaggtgaccaagagggccgcgcgggattcggggtccacgccgtcttccttgataaggccgcgtaccgtgagcgagcgaatcacgccatcggagttgacaccgcggatcgcggccacttgggctcgggtgacgggttggcgataggccacgatggcaagcgcctccagtgcggcctgactgagtctcgcagtctggccgtcagtgacgaatgatgagacgaccggctcgaacgcggcgcgactggcgaactgccagccgcgagcggtgcggcgcagttcgaagccgcgcgggcggatgccacgggattcatcgccctcatagtcatcgtgcagggctcgcaatgcctcttcgactgtgttgcggtccaatgccaaaatacgggccagctcggtggcggtctgcggctggtcggcgaccatcagaatcgcttccagacaggcgggcagcccgccgggaaaatcgtctaccgtgaaatccacgtattcggggcgcgtctcctccattcccctcaccgcggcctttgcggattcagccgtcgattcggcatccgccatgtgttcggttgcattcgttgcgtcaatccgttcagtcaccaatcaccgtccttacgcaaaatcgccttcggaaatgttcacgtcgctcatcgtttcgtctacgccgggtacccacctcaggtgcagttcggcaaacggaccatcttgctgatactgcagcacaccttgtttgaagaacacgagcacggccatgaaccgagccaccacctcaatacgagaagtgcagtcccgggtcaattcgctgaacgacatcgactggtcgcccttggattccaatgccgcgatcagccggtcgcgtaccaccagcgattgggcccgcagatcgaccaacggtacgtgcagctgatggatcgacacttcggaggcgggcgcgttggcgatgacctgggcggccagttgggcgagttcgagcggagtcagcgtccataccagctcaggcagcatggcggcaacgccctcgtccatggccgccggatgtgggaatcggccggagttggcggcgatacgcgcccggaaatcaccggcggcctgcttgtaggcgcggtattggaggagccgggcgaacagcaaatcgcgttcgcgcagcgcttcaaagctttgctcgtcgtgctggctgtcttcgccgccgggcagaatcgccacgcttttggcctcgaccagaatagaggcgatatcgagaaaggcgctggcctcatccatgttttttgtgaaatcgagcccgcgcacgtatgtcaggaattcctcggtgatcgaggagagggaaacttcggtcagctcgagtttgttgttggcgatcatgcccagcaaggcatcaaacggaccggaatagacttcgaggttgacccggaagccggaagtggcggattcctccgtgctgatttcggcttccgcggagcttccctcagcctcgctacgcgagccagcttccctcagagaggggagccgagaaagggaagtctcattcatcgtttatcgaaacaatcgttacgccacgatgccgcgagcaatgagctcacgtgccacctcacggtattcctttgacgtcttgtgctcaggggcatagaccaccacgggcgcggcggcaaccgtggaatcgggcagtttgatggagcgggagatgaacgcgtggaacaccttttcgctgaacgcctcgtaaatgcgctggcatacctcttcgcagtgcagtgtcttggtgtacatggtgatgagcacgccgtccacttccaatgcgggattgatgcgggactgtactttttcgatggactgcatcagcagggccacaccgcgcaaggcgaagaattcggcggccacgggaatgatcacgccatcagctgcagcaagcgcgttcacggtgagcaggccgagcgatggctggcagtcgacgatgatgagatcgtattccgacttgagcttgcgcagcacgctgttcaggatctgctctcggcccacttcggtgaccagctggacctcggcggcggacaaatcgatgttcgccggaatcacatcgatgttctcgaatgcggtgtgctgcaccacatcatgtgggtccacggaaatatcgaacagcgcggtgtaaatcgtgttctccacggtattcgcattgacgcccagtcccacagtggcggcgccctgcggatcgaaatcgacgataagcacgcggcggccatactgggccaacgcaccggcgatattgatggagctggtggtcttacctacgccgcccttctggttgcacatggcaatgacacgcgccggaccgtgctgttgcagcggttcgggtgcggggaaggtttcgtattcacgtccaagcaaatcggtaggcatactgtctaccttatcaacatccgggttcgctgggggtgcaacgacatacgttcctgccataggcagcgttccttgacggaatgcgctgtctttatcgcgggtgtctcgccaatcgtccatcgttgccctcgccccctttgccgggaatacctgctcgcccatcctaatgtactcgccgcgctcgcctcggaacaccgttttgccgctggtattccagtgttccgaggtttatggatctcgtctcgtactatgtcgatgcgcttactcggtgcgcagtgcggtggccgggtcttgcttggctgccttgcgcgagggaatcaggccgccgatcagcgtgagcaccacgcttaggatcaccagcaccacgccaccggtcaccggcagggaggcattgacgtccgcattgccgatgaagtggtgtagcacggcgttgatcggaatattgagcagcacggtcaagcccacgcccaacaggccggagcataggccgatgatgccggtctccgcattgaacacctgggatacgttgtgcttcgaggcacccattgcgcgtaggatgccgatttccttggtgcgctccagtaccgaaatgtaggtgatgatgccgatcatgatcgaggagacgatcagcgagacggacacgaacgcgataagcacgtaggaaatcgcgttgacgatggtggtcaccgaactcatcatgagcccaacgtaatccgtgtaggtaatcttgtctttcttcgagacggtgttgttgtagtcggtaatcgcgtcggcgatgtggtccttgtcttcgaaactgtcggcgtagatgttgatcgagctgggcgcgtcacgactcaccacaccgaatgcggcgaggttgtcgtcgtaggtgccggtcgacacgtactggtcgtagatcgcgacaagcacgtcgttcgaagccgtggcgatatacgagtcgaaactgtcggcgagctgctgttcgctcatcgcggccatcgcggcggcctgatcgccggcacccgccgcaccagcggcacccgcagcaccagccgcaccagcaccagcggcgtccgatgagcccgtgccgtactgctgcccggcactcatcatcgacttggccatgttcgccttctgcgtcacgcccagcgaagccacgtaggtgcgcgcgtcggccgccttggtgacgtcgtccgagggcgagaacgtcatgccgttgagcacgttcgtgttcgggttggccttctgatcggtaacgatggcgctggaggccgcacggtcgatcaaatcattggtcagagcgcgcgtgtaccccacaccagcggccaacggtgtggccgaggcatccttcttcgccttgacgacgcccaccaccttgagtttggtggccgtttcgaggcgctgttcgatttcgtccttgtcgttgccgatgaaacggtagtggccgtcatcgcccttgacgtactggtcggatgccggaatcatgtacagcgtctgatcgagggccttagcatagtcgatcttgtcttgtggagtgctgaccttgtcgccggcgttgagcttggacatcatctcgtggtaatcggaggcgggcagcaggccgagctcgtacagcgtggtcagcggcacgctgttgttgtcgtcaagcaccagcaccacttcatccttggacttcggccatgaaccgttgaccacctgatagttgtcggtgatgaccttgcctacgagcttgctgtcgtccgctcccggcatgatctcgttgaacgagtcgggcgcggcgttctcatcggttttgccggtcagcatcgacatctgctgcgaggtgatcgacgaggtgccggacatgccggacgagcttgtggacgccatctgcgaggccatcgaggcagagtcgctggatccgatcgtcacgccgtccgcattgaccagcgtgccgtcggggtcgtggtcgaacacggagaatttcacgtcatatgtgtactggatgccggtggaacccacatactggtgaatctcgctcttggaattatccaggtatttcttgaagcgggtcaggttgttttcggtaatcgaactggtcaggctggacgcctgcttgacgctgcggtcgtccgggtagatgccgtcggttttgtgcgtcttgccgccgtatccgtcatcgccgcccatctgtccgcccatcatgctgctcaggtcgaaggtctgggagtcgatggtgatcgggtaggcggtcatcgtgtcacgctggatgtcgctgatgtatgcgttcacgccagtcgacaccgatagaatcagcgcaatgccgatgatgccgatcgagccggcgaacgaggtcagcagggtgcgcgccttcttggttttcagattgttgaagctcaacgccagcgacgtggcgaacgacatcgacgcgcggcccatcgtcttgtacacggccggctgttcggccgtctcgtccacgacgaacgggtcggagtcggagcggatcacgccgtcgcgcaggttgacgatgcgcgtggcatattgttccgcaagttcggggttgtgggtgaccatgaccacgaggcggtccttggccacgtccttgagcaggttcatgatctgcacggacgtgtccgaatcgagcgcgccggtcggctcgtcggccagaacgatgtccgggtcgttgaccagtgcgcgggcgatcgccacgcgctgcatctggccgccggacagctggtttggcttcttgttgatgtgttcgccgagtccgaccttctccagcgccttgcgcgcacgttcgcgacggtcggccttgccgatgccggaaatcgtcagcgcgagttcgacattcgacagaatcgtctggtgagggatcagattgtagctctggaacacgaagccgatggtgtggttgcggtacgaatcccaatcgcgatccttgtattggcgcgtcgagatgccgttgatcaccaaatcgccgtcgtcataccggtcgaggccgccgatgatgttgagcaaggtggtcttgccggaacccgagggacccagaatcgcgacgaattcgctgtcgcgtaggttcaggctgactttgtcaagcgcctgctgaacgaaatcaccggttttatagcgcttcgagatcgatttgatctgcagcatgaatacctcttcctggctgacggttcgctgttatgtactgtattgtcacgccttgaatttccggccgactttggtgctcccccgccgcgattccgctatgggcggacgcgtcgcaaaatggtgtgtctcaccgcgctctgggatgtgaggtcagatacgtttcgatcagggtttcagggcttacgtgcgtgtagatctgcgtggtggtcacgctggcgtgcccgagcagttcctgcacggtgcgcacgtccgcgccgccttggatcaggtgcgtggcaaaggaatggcgcaaggtgtgcggatggagtggtttggtgatgccggcccgctccccggttgctttgacgatttcccataccgattgccgcgagatgcgcttgccgcgtttgttgagaaacagtgcgcgcctctcgggaatcttggcgctggagcgctgttccaactcgccacgccccgcattgaggtatgcggtgatggcccggcatgcgtaactgcccaatggcacaagccgctgcttggagcccttgcccatgagtcgcgcgatgtgctcgtccaggtcgatgtcgtccagattcgcaccggtggcttccgagacgcggcagccggtggcgtacatgaattcgagcagggccttgtcccgtaataccaccggatcggttgagccgccgactgccgccgcgtcgagcagacgggttacctcgtccacggtgagtacgtcgggcagggtgctggcgcctttgggcgccttgactgcggccgaaacatccgccgtcaccgcgtgctgaccgagcgcgaaacggtggaattcgtggatcgaggccagtcttcgggctttggagcgggcggactcccccgcctggtcaagggcggcgatgtagtcttcgacgtcttgtttggttatggcgtccggttcgtggatgccgcgggtttcgagccaatcaatgtatttggcgatgtcggattcgtaggcggtgacggtggccgtggcgagccctcgctccacgccgatgtggacgaggaactgctcggtgagtctggtgaatccgttggtcatagtgcccatggtacaaagaaaccccgctcggaagcggggtttctagtgtgaagtcacgacttcaagcaatcaggcctcaaccggagcgttgacgtcctcaggcagggcggccttggcggcgtccacgatggtcttgaaggtgtccgggtcggagacggcgatctcagccagagcgcgacgatccagctcgatgccggcgagacgcaggccctggatgaagcggttgtaggtgatgccctcagcgcggacggcagcattgatgcgctggatccacagcttgcggaagtcgcccttgcgagccttgcggtcacggaagttgtagttaaaggagtgcagcagctgttccttggccttgcggtacaggcgggagcgctggccacggtagccggaagccctctcgagaacaacgcgacgcttcttgtgggcgttcactgcgcgcttgacacgtgccataatctattcctcagctttctaaagtcttgttatttccgggtaagccctatgctcacttctgcagaagctggtgcagcttcttggcctggccgccgcgcagcacatcgtcggcggacagttcacggcgcttgcgagcggacttgtgctcgaggttgtggcgcatggcggaaccgacatgcttcaccttgccggtgccggtgatcttggcgcgcttggaagcggcggaattagttttcatcttcggcattgctgccctccttgctggtttgcttcttgtcggaagtcttctgagaaatcgcggactgcgcgtcggccgcggcctgagcctgagactcctgcttggccgcgagacgagccgcctggcgagcctgacgctcggcgcgggactcggcgccacgacgacgctgctcggactgggtgtgcaccttcttgcccttcggcgcaagggtcatgatgatgttgcggccctcctgcttcggcttggactcgacggtgccgtattcctcgacatcgtcggccagacgctgcagcagttccacgccaccaatcgggcgggagatctcacgaccgcgcaacatgatggtgaccttgaccttgtcgcctccgttaaggaagcgggtcacatggcccttcttcacgtcgaaatcgtggtcgtcaatcttcaggcggaaacgaatctccttgatttccgcggtgctctggttgcggcgagcttcacgagccttgatcttctcgttgtacttgaacttgccgtaatcaatgagcttggcgaccggaggcttcgcgttcggggccacctcgacgagatcgaggtttgcctccttggccaggttcagcgcgacggaagtcgcgatgacgcccacctgctcgcccttcgggccgatcaggcgtacctgcgggacgcgaatctcgtcgttaatacgtggttcgtcgctgatgatgactccaatcctctacttcaattccgtggcgagggcctttgctggagtcctgttcaatgctttgggttcatggcaagccaaagcccgcgccaatatgcgctcagcttctgcagacgcatatcagttctttgcgtcattcctgattacgcgttgtatatcgcaatcgctaggctgtttgccttgaacccgaggccttgaaaggcttccaggtggggttgccccgctttcttgatttctcaagccaaatagaaagtctaccatacgcccggacattcgcggtccgtgtgtcgaacctactgcacggcgcgcagcagaccgccgaagccttcgtctttgagaatctgccgatatgggccggcctcatcggcgatgatttgatcgatggcatgcatgccgagtacttcgaccggcgccttgtcgtcggtgagaatagtcgacgctgagtccggttcgttcaccttccggaatcgagaggcgacctcttccatataccattcgagatcttcgctgccggtgcgctcgtaggtggtctcacgcaggttgagcgccttggaggcctgctgcatggagttctcttcggagccggaacccggcttcttggcgaacagttcacggttcgtggtgttcggcacgtcggccgtcagtgtgttcctattgccgaacacgctggcgatggtatcgctcaacgcctcgttgatcgaaccttggccgtccgagatcatgttcatgttcaccaccatcacgccgccggggttcaggtgctctctgaccatggtgaagaactcggtggagctcatctggaagggaatggtgatgtcctgatacgcatcgaccatgatcacgtcgtacttgtcatgcgaggcggcgagccaggctcggccatcatacgtggtcacggggatgtcggcgggctcatcgaagtattcgccggccagatcggtgatcttctggtcaatctccacgccggtgatgttcattttcggataatactgcttcagctggcgggcgtaggtgccggtgcccatgccgaggatcagcgcggaattggcattgtcggcgagcgccggcgcagccagggccgtgtcgtagtacatacctgtcagtcctttgtctttcatcgtgacggactgcacgccgaacagcacgttggtggacaggatcgtgcggtcggagaggttcttgacctgcaggtagttgtagatggactcgccctcataggccaggttggtttcccagaacgcgaagccggtcaggggcgagacgcaggacgtggccacgaagatcacggcgctgaccacgcaggcgatgcgcttggccttgatcgagatgaagtagatcagcggacatgccggagaagaattcggtgatgtagaggaatatctttgatttgagaatcggccgttcgcttgcctcggtgatctgtgccatcgctccgctcccctgcctgtgcgcctatcgactactgttctgatgcgtagcctatcagcattttcccggccgatgggtggataccggctacagtaggcatcatgactcaggtatgcgtgatttttggtgcgggcgaatactatgcgggcacgcccgtggtgccggccggcgcgtatgtgattgcggccgatggcgggctcgaccatacgcgccagttgggtatcgtgcccgatgtggtggtgggcgacttcgattcgctggagggccggccgccccgcaccgatgtgcgcaccatcgcgctgcccgcgctgaaggacgatccggacatgctctccgcgctgaaggtcggttggtcggcgggttgccgcgaattccatgtctatggcggtttgggcggccgcattgaccatacgatttccggcattcaactgatggcattattggcccggcatggggcaagcgggtatctgtatggtgatgggctcatcgtcacggccatcaccgatggtaggctttcgttccccgcgcatccggtgcccgaggacggccgcatggtgtctgcgttctcccactccgatgtttcgcttggcgtgaacgagccggggctgaaatatgagcttaaagacggcacgctgaccaatacggtggtgcagggggtaagcaacgagttccgcgacggcgtggacgcggccatcagcgtggagcacggcacactgatcgtcaccttccccatcgaggtggcgttgcctcaggtgagtcgattccacgaatttggcggcgatatcggcgagctggacaccgcagtgtccaagctgctggttcgctgacttgcatgccgcgcgcttgctcatgatgattcgagacattcctccaaaggagaggaaaaatcacatgtcggttgcgggcaatccgaattgtgagcgctcacagaaaatacggcatttttgcccaaaacgcacgctgaaacgttgccatgtgtacagagtcggcattacagtagcaactgttggtaaacaatggcccggtgtgccaaagcgcgccaaggccaccctacaagggagaattacatgacagttaagattggtatcaacggcttcggtcgcattggtcgtctcgccttccgtcgcatcttcgagctgcaggctcgcggcggccaggctggtgacattgaagttgccgccatcaacgatctgaccaccccggctaccctggcttacctgctgaagtacgacagcacccacggcaccttccgtcatgacgatggcactccggttgacgtcaaggccaccgaagactccatcatcgtcgacggcaaggaatacaaggtctacgccgagaaggacgccaacaacattccgtgggtcaagaacgacggtgttgagtacgtgctcgagtgcaccggcttctacacctccgccgagaagtcccaggctcacatcaacgctggcgccaagaaggtcctgatctccgccccggccaaggatgacaccaccccgaccgttgtgttcggcgtgaaccacgacatcctcaaggcttccgacgtgatcgtctccgccggttcctgcaccaccaactccatggccgccatggtcaagctgctggacgagaagttcggcatcaaggccggcttcatgaccaccatccacgcctacaccggcacccagatgctgctcgatggcccgcgtggcaccaagaccggccgcaacctgcgcgccgccgccatcaacaccatcgcccactccaccggcgctgccaaggccatcggcaaggtcgttccgtccgtgaacggcaagctgcagggccacgcccagcgcgtccaggttccggacggctccgtcaccgagctgaccaccgttctgaacaccgagaccaccgccgacgagatcaacgccgccttcaaggctgccttctccgacaccgattactacggctacaacgatgagggcatcgtctcctccgacatcctcggcgacacccacggtggcgtgttcgacccgacccagaccgacgtcaacaccattgatggcgtgaccctggctcgcaccgtgtccttctacgacaacgagtacggcttcacctccaacatgatccgtaccctgctgtacttcgctgagatctccgagtgaaccattgcggtctaggccgctacggttcgtttgagaactaagctgtgagacccccgccttgtgcgggggtttcttcgtagtagaacggtaatcatggcaaagaaaagcaagcatgataagggcgcgggttccactccggcgacagtccaactggagaaggcgggcgtggaattccacgtatacgaatacgagcactccaacgaccatatggatgacggctacggcgtggaggcggccaccaagctcggcttcgacgagcatcaggtgttcaagacgttgatggcggacaccggtgccgaacgcgtggtgggcgtggtaccggtgagcggtcatatggatttgaaagccttggctgcagccgtaggtgccaagaaggcctctatggccgatcccaaggtggcgatgcgtgaatccggttatgtggttggcggcatctcgccgttaggccagaagacacgtcataagactgtgttggatgaaagcgccctgcaattcgaccaaattctggtctccggcggcaagcgaggcctgtctgtgggcgtgaatccacaggacctgctcaaggtcttgaacgccgttgccgcaccaatcggcacgtggtgaccgttcttggctcccctcacggaggggagccaagaatgactacttcttcctgcgcaactccgccggcagcacaaagtgcatgttttctttgatggtttcgacggacttcataccggtgaaacccaagttttgcagagcgtcaatcacaccggacaccagttcgtccggtacggaggcacccgaggagatacctacggattccagaccctcgaaccatgccgggtcaagctcgctggcatcatccacgcgatacgctttgccgcgctcccccaagccctcctgcgccacctccatcagtcgcacggaattcgaggagttggccgatccgacaatcaccacgcaatcggactgctgggccaccagtttgaccgcagcctgacgattcgacgtggcatagcagatatccgaactcggcggctcttgaatccaagggaatttggccttcagcgcggcaatggtatcggcggtctcgtccacgctcaacgtggtctgcgagagcagcaccagcttggtgtcgggcgcaaaatccagcgaatcgacatccgattcatgctcgatcaagtgcacgtgttcggggctctcccccactacaccgaccgcttcatcgtgacctttatgcccgatatagacgatttcatacccctcgcgcacgaaacgcagcacctcacggtgcaccttacccaccagagggcaggtggcatccaccacatgcatgccacgacgttcggcttccgccttcactaccggagatacgccatgggcggaaaacaccaccggaatacccgcttgggcagcagcatccggaatctccgccaattcctggacgaacaccgcgccttgcccggccaagtcctcgaccacatgcttgttgtgcacgatctgccggcgcacatataccgggggcagcccatcctcgcgcgtccgctttccggaagcctccgcggctttgagaatggtctgtacggtaagaatcgcacggtccacacccgcgcagaagcctcgcggatcagcgagcacaacgcttttggtcatcggaacctcctgaacgtcaatagtgttttccagtgtaaggcagggattacaggaatctgccgtcacaacttttccgcgtctcccacaaatcaccggtttccaaggaatccacgtgcttctcgcatgatggtgtgagactcgtcactccacgtattgctaccgtgtttatacgaattgtttattatatgccgcatatcgccaatccccgcctcgatagaggagacgcgctagactggggccagcgatagcaggagctaccggcccaccaacctcactacgggagtgattccatgacgagtaaaacaccacgcaccggaaatcagtattcgattcactatggcgattattccgccgtcatctgcgaactcggcgccaagattcgccgattcgattatcaaggcaaggaaattttctgcccgttcggcgtcaacgacctgacccccacctgtaacggttatgtgctggccccgtggccaaaccgcatcgaaaacggcgaatacgatttcaatggcaagcattactgcgcgccggttaacgaatatcatcccgaaccgcgcaacaatgcgaaccacggatacgcctaccactacatgtggaagcttgaatcgttgaccgatagcgccgtgacgctttcgctgcgcttccccaacttggacggatacccgttcgatgtgaccgtgaccgtcacctacgaactcggcgacaacggcatgaccgcgaccgtcaatgcccgcaatgatggcgacgaaccggcaccgtgggctctcggcctgcatccgtggctggccaacggcaagcagggcgcaactgccgccgaacgcgatgccgactccgccgcctgccacctgcagattaaggccgccagtcatgtgacggtgaacgaggcgctgattcccaccggcaccgaaccggttaccggtatctacgacctgaacgatggcccgacgctcgaaggccgcgcctttgatgatgcctgggtcgacgtggagcgtgccgccgatggtacgaccaccaccacattcacccgcccggacggtatcgaagtgaaaatcattggcgatgagacgattaatgcttggcagtgctacaccgccactggcgcaccgttcgccgagcatccgtatggcatcgccgtcgagccgatgaccgccccggccaatgccttccgcactggtgaccacttggtgacgctcgcccccaacggcgactacaccactgtggtccgctacgaagtagtccagaagtagttctgttacgctggctcccctccagaggggagccaattttttatccttatgtgccgccgcgtcttgggacttatgcgatacgattgtgagcgataacaatttgttccacaaaggagtgtgcactatggctttgaagcctcgcactggtaaccaatatgtcatctcgtccggcgaatggagtgccgtcgtcaccgaactgggtgccagcctgcgcgagctgaagtggcgcggcgaagacctcatcgtccccttcgacccgaacaaggtcattccctgctgcaacggctgggtgctggcaccgtacccgaaccgagtgaccaatggtcagtattctttcgatggcgaagactaccagatgccgatcgacgagttcgaccgccaatcctccctgcacggctatgcctaccgctacatgtgggagctcgttgatttgcaggaatcacacgtgacgctctcctggcgctcccccgacatcgccggctacccgtttgatatcaccatcaccgccacttatgcacttgacgagaacggtctcacggaaaccttcaccgtgcacaacaacgacagcgtgaaggcaccgtgggcatttggcatccacccgtggctggccaacggcaagcacgccaccggtcaggccattaccgccgacaacgagccctgccgtcttgagctgcactgcgacacccacgtgaccgtagacgaacacttgctgcccaccggtgaagagccggtttccggcatcttcgacctgcgcgataaccccacgctggagggacgtggcttcgacgatgcctggaccgatatcaccaaccgcggtgaagacggcagcacttccgccgtgttcacccgccccgacggcatcaaggtcacgctgaccggcgacaagaccatcaactcctggcaggtgtgcaccggcaacgaaatcggcgagaaggctcgtcaggccggcgtggccgtcgaaccgatgaccgcctacgccgacgccttccgcaccggcaaggatctggttgtgctcgagccgggcgatgactacaccaccgtggtcaccttccacgccgaacaaatctgaaaaaccgaatagccaagcctgacgatcatcgccacatggacacccgtgttgcatcacgtcgtgctcatgtggcataattccgaaggcttatttttttactgcagcaaaggagtccatcatgggcatgcgcggacgtaagcgcaagaatcgtcgtaagaaggccgccaaccacggcaagcgtcctaacgcctgattcttcgcgtttcttatggaacgctcaaggcccgtctgatgatacatcagacgggccttgttgtatatgtcgttacttatcttcgccgcagcagtgatcaagcgtggccttgagccgggctatcagacattcgggtgccacatccgggcgcaagtaggcacgcaacgcggcaatcaacgcctgttcacgctcgtcgcagcaggtacgggggtcaaaacagtcgccctccgtaacgatatgcacgtccgcctggaccgacgcagaggccgagccggtatccactgaacgatgatgcaccgccgtgatatgcacttcggtctggctgaccatgccatcggcccccgtacgggttatggagatatggcgagtacgctctaccggctgatcgttcatcagatctcctttcccgaaagcttgcttgactgttgtggcgtgcgggcgccagtcgcatgactatgtctcactgcggcttgcgtgtcgccattgctaccaacagtttgttcactacttccattatggccggaatcggcgattcgaccaacgttttcgcccaacttcgcggatggtgaaccagccgacgaaccagtcacgtacccgcgctctttcgcatacgaggcgagctcacgcttgagttgcgtgcgggcgcgattcaggcggctcatcaccgtgccgattttcacgccctgctcatcggccacctgctggtaggacttgccgtcgatggcggcgtcgatgaacacctgccggcgttccggcgagagtttggcgagcgcggccatgatttcctcgggcgcgaaggcgtccaaatattcctcttcagcggacttgagcccgtccgacgtatgttcggcggcatcgtaaatgtcccagtcgtcgtattcaccggtggagtcgttggcacgctgcgggcgccgcttggccttggcatactggttgaagtaggcattgcgctcgatggtggtcatccacgcctcgaagttggagcccggctggaatgagtcgaaggccttgaacccgcgttcgaaggtgtcctggaccagatcctgcgcgtcatcgggatcgttggtcagcctcatcgcctgccggtacagtgcattgacggcgggcatggcgagctgttcaaatctggcgcgcttggctgccatggactcgcccgatccggctgactgcccggattgcatagttgcttcgcttgtcgtcacgtttcaccattctaatcaaatcatgtgcccatatcgtggtcgatgacgtgtgagccacaacacgctgcaccccacctgtagaatggcgtatcggctagataatagggagtaacaattatggctttgactttggcttcggccgctgacctgctcaaggaacaccatctgctgcgtgaaatcatccaaggggatgtctggaccgacgacccggcccgtatcgcttcggcggatgagccgttcgccggcatcacctacgacacccgcaaggtcacgccgggcaccctgctgtgctgcaagggccagttcaaggccgaatatctgaacggcatcgacgaagccggcctggccgcatacgtggccgaaaccgagtactcagccgcaaccgccacccccggcctgatcgtcaacgacgcacgtaaggcgatgagcctgctgtccgccgcgttctacggatatccgcagaacgagctcacggtcatcggcgtcaccggcaccaagggcaagacgaccacctcgtacttcacgcaggcgcttatcaacgccgtctccggcggcaaggccgcattgttctcctcggtcgataattgccttgacggccacacctacgtcgaatccgatctgaccacacccgaatcgatggacgccttccgcatgatgcgcgaggcggccgataacggtatgaagtatctggtgatggaggtctcctcccaggcgtacaaggtggaccgcgtctatggcctgactttcgatgtggccgcgttcctcaacatctcccccgaccacatcagcccgatcgaacaccccacgttcgaggattacctgtattgcaagcgccagatcatcgtcaacgcgaagtcgctggtactcggcgcggacagtctgcacgccgatctgttgcgggaggacgcggaggcagccggcatcggcgtgaccaccttcgccctgcatgacgcggataatgccggcaccagtgcggacgtcgtcgcctggcccgccgacccggcgcacgcctccttccacatcgccgacggagatcaggcccttggcgactaccatctgtccatcgatggcgacttcaactacctcaatgcggcggcagccatcgccatcgcccatgcggttggcgtatcgctcgatgacgccgacgcactgcacgccatcgaatccgtacgtatcgccggccgtatggaacagttccgcgacccgcagtcaaacacgctcgccatcgtcgattatgcgcacaactacgcatccgtcaccgcgctgcttgacttcgtctacgagcgttggggcgaggaaaacccgcgtatcacgctggtgaccggatcggccggcaacaaggcctacgatcgtcgtaaggaaatcgtcgaggctgccgagaaccgtatcgcgaacttcattttcaccgccgaagatacggacaccgagccgatcatcgacatctgcatggaaatgcaaggctacatcacgaacaaggatgtggtctccacggtgatttccgaccgtctgacggccatcaccaacgccatttacgatgcccgtgcgcacgccgaccgattcaacatcctgctgatcatcggcaagggcaacgagcgttggatcaaggaccatcgcaagcatgtgccgttcgacggcgacgatcacgtcgtcgaacgcatgtttggcttgtgacgggattccggccaatcaaatcctgatcggatcccgattagcccacatcagatcacgcgcaatacgaccaaaccagaaacacgacatacggatacaaacgaaaaaggatagctgaatcgtaatgatcacgttggagaaagttgacggagccacactggaagccgaagccgagaaggccggcatcacgttgcctatcgaacagaccaaggtttggtctggttttcaggcggatatcgacggacgcacaccatggggcaattatctgatcaagcgtgatggtgaattggtcgccgtgatctcctttatcgattttgagacgcacggttatcattatctgcgctcgatgcatgggccggcgtgggtcgccaagcccaccgaggctgaggagcgcgaggtcgtcgacgccatcgtggacaccgtcaagaaggccgacaagagcatcgcgttcctgcgtatcgacacctggttcgccgatggtacggagaaggtgctgtccacagtgccgtacgaccagaccgtggtcatcgacatcaccggtggcgatgatgagattctggctcggatgaagcgtcgtggacgccgtgacgtgcgcaagtctctacgtgaatgcccggccgaggttgccgatgagacggataaggccctgaccgatttctccgaatattacgatgtgatggtcgaaaccggccagcgcgatggattcacgcctgctccgatgagcgactattccgatatgatcggcgcgttgggtgccgatcattgccgtgtgttcgccgcacgtattgaagaccgtgtggtggcatggtcgattgtcaccgtgaacggcacgcatgcggtgcgctactatgccggcatgcgcaacgaggttatgcgtctgcatgtgaccgacaagctgctgtattccgaatgctgcatcctgggctcgcagggtattacggaatacgatctgatgggcatcggctccgatttcgcgccgtcgctcaaggggcttaacgagttcaagtgcaagttcaccgaggaaatcaccccggtggcccccgcccgcgacgtacccatcaagaaggtcttctacaagacgctgcagactgtgcagggcgtgcgcaaggcattacgctaataccaccccgctcccgctggtgggagctgtcgagcgaagcgaaactgagggtggtctttcgagatggaccaccctctgtcacctgtggcgccagttcctaccagcaggaaccattcatttatcgttcgagtttttggctcaccacggctgttacgccgtcggctcgcatggttacgccgtagagcgcgtcggcaatcgacatggtgcgttgctggtgagtaataatgatgagctgcgcatgggcgcgtagctcattgaacgcattaatcaaacgggtcaggttcacgtcgtccaacgcggcctcgacctcgtccatcacatagaacgggctggggcgggcggtgaaaatcgcgaacagcaacgccagcgcggtcagtgaacgttcgccgccggacaggaggctcagctgtttgacgcgcttgccggccgggctggcctcgaccagtacgccggtggtgagcatgtcttccgggttttccaagcgcagtcgcccggtgccgcctgggaacagcgtggcgaacatctgctcgaatgcctcggcggtatcgtcgaacgcggatttgaatacctggaccatcgtggaatcgagatccttgatgagctgcatcaaatcgtcacgtgatttgaccacatcgttgcgctgatcattgagatacttgttccgctcctcaagcgcttcgaattcctcggtggccaaagggttgatcttgccgagtgcggccagatcgcggcgagccttatcgagacgcttcttctgctcctgacggttatacggcacggtcttaaagcggtcggaatcgccgttagtgccggtctctcccccggtttctccctcttcggtctcagcctcagcttccgtctcatccaacggcacagggttgccctcatcatccagcacgggcaccggctgttcggggccgtaatcactaaccaattcctccaaagtgagaccgagttcgtcggacactttttgcatgagctgcccggattcggcggccaaccgttcgcggtttacatccaaggcatgttcgcgcccggtcagatcggtgaccttgggctcgatctggttgcgctgcgcgcgcagggccttgagttcctcgtcatggctggaggcggcggcctgcagctcgtctcgtttggcggccacgtcatgcagcgtatgctctaccatggcggccactgctcgcgcgtcatcggccacgccttgcaggtgtgcggcctgctcgcgtctgcgatcgctcaacgcctcgatgcgggcgcggcgttcggcggcttctttggcgttgtcccgcagcagcccggcctgtcggctcagtgactcccctttgcggcttgcttcggtccacgcgatttttgcggcgacctcatgctcgcgagtcaggttcagttcgcgctccagcgtgcgttcgcgttcatcgagttcgtcgaaatcggcatgttccgctgtggattgctgggccgatgccaaagcgcgattgaggtcgtcaagcttgagctgatgctcgttgcgattctcttgggtctcggtgattttcctatccagctgctcgagctgacgggtgaacgatgcgacgcgatctgtggcggatttcagagatttctccgcctgttgggctttgagccgggcttcggtgcgtttggcggattcctggtcgacgagtcgagccgcttcatcgcgcttggttttggcctcggccacttgctcagccattccgccgtcttgtgcggtcaactgtttgacctgtgccaatgctttgtctcggcgggcggccagagacaggtccgattgagagattgaagagccgccgaccgccgccacgccgtgtgtgaaggtctcgccgttcttggtgacggcccgcatggcttcgccggatgccacaatctgttgggcttcgtcggcggtgccggccgcggctacatcagccagcaggagacgcacggtgcgcacgaccgcttcggcctgtgccgggttctcggcatccgggttcgcggtgacgagtgctgccagcgcgttgcccgattgcggggcggcccccgcgttctcggcgctactctcctccgactccgtgcccggctctgtggcgggatcgccggcaatgctcgcggtcagcaccacggctttgccgagcttatcttcccgagcgcgttcgagggcgtgcaacatgttgcctgcctcgggcaccacgatggcgctggcatactggtcgagcgcgtgggccacggcttcttcccagccttcggccacatggatgaagtcggtgagtcgaccaagcgaggccacgtccgtgtcgcgttccaacgatccggaggcattgcgactgcctagcgtgtcggcaagcgcatcggccttggatttgagcgagatgatcttggactgtatctcgcgctgcttatcggcgcgttcattcagtcgttcgcggcattcggcgagcgttgcacgtgcggcgtccaatgcggcaccgtcatcgtcggcgatggagtccgcttcgctgcgcaatgcgtccagctgttgctgggcatcgtcgcgctgggaagtcagcgagtctcgttgggaggcgtaatccttggcgcggctggtcgccagttgtacggcggattcctcgcgggcgatgagttcgcgcagtcgggcgatttgcgcatcgcgttcctgtgcggttttgcgcagttccgtcaaggtctggcggactgaggcaagctttttctcgtcgtcggcgcgttcctcggtagccttgtcgagtgcgatgcgcgcatcggccacggccttggtttgtgtcgcggcctgagactccagttcctcggctcgtttgacgagcatgccaggatcctcaccgaagttggtgacgatctggccggcgagtgaccggctgcgctcttcggccaactgggcgagcgcgttcagtcgttcacgggtctgcgagaattcatgccagtattggttggccttggcgatggccggactggattcggagctcaacgcctcgacctgttcgatgcgtactttgacttgggcgagttcacgttgggcgacggccagctggttgcgcacatcgccaagctcttgacgtaccgtgtcgcgacggctcatcgagcgttgagcgtcttcggcgtacaggcgggcttgggcgtcgcgtacggatatctgaatcgcgtcggcgcgccgggagatgcgtgcctggcgtccgagggggccgagttggcggtgaatctcccccagcaaatcgtcgagtcggctcaggttcgtttcggtattggccagcttgcgcaacgcgcgttccttgcgcttgcggtgcttcaggatgccggcggcctcttcgatgaacgcacggtggccggacgggtcggccttcagaatcgcatccaatcgtccctggcctacgatcacatgcatctgctggccaagaccggtatcggagaggagttcctgaatgtcgagcaggcggcattgcgagccgttgatcgcgtattcggagcctccgttgcggaagatggtgcgggagatggtgacttccgtgtaatcgatatcgagcgtgtgatcggaattatcgatggtcaggctcacctgtgcacggcccaatggcgggcgggaggacgtgcctgcgaaaatcacgtcctccatcgaagtgccgcgcaggtttttggcgccctgctcacccattacccagatcagggcgtcgacgatgttcgacttgcccgaaccgttggggccgacgaccgccgtgatgccgggctcgaagcgcagcgtggtggcggaggcgaaggatttgaatccgcggagggtgagttccttgagatacatggcgtgagactgttttccgtatgccgggtgtccgggtatccgatatgccttggatgcgggttaccgggcgtcggcggaatcgtcggtgtcggtgtcggcactggccgtgccggtgccggcgttaccggcgtcactggcctgttccttgccgaggccgaggacgtcgaacacgtcgaagtcgtccgggcttaccgaatcctcgaggttgtcggcggcctcatcctcggccttgtctgccggctgatccgaatcgtccgggtcaaccgccggctgatgaacggccatagcctgcctcatcgtggggctggcgtgttcctcaagcatcaggcgtgcgtcgccggcggtgacgaagctgccgcagataagcacgccgtggccgtagcccacgcccagctcgtcctcggcatcgaccatattgacggcggtctgaatcgcgtcaggcaggttcgcttccttgatcacacggtcacgaccgaacacgtccacggcaatcttctcaagctcgtcggccggcatcacgcgctcgcgccacgaattctcggtgaccaccacggagctcaggatcggctccagaacacccagatattcctcgacctgcttgtcgcgcatcatggcgaccacaccgaccagctgcttgaagtcgtagctttcctcgatggccttgcgcagggcttcggcggcattcacgttgtgtccgccatccagaatgatggtcggtgaggtgcggatctgttcgatgcgtccgggaatcttgaccgagctcaacgcctcggccaccaagtcgccgtccagcggaccgttgaccggaatcaccacttcggaggcggcgagcgcggcaagcgcgttgtgggcctgatgctcgccgaacttggcgatcggcacgccctcgtaagtgccgttgggcgtggtcagggtggcgacttggccgccgactgcggccatacggtcggacgcggtcatttcgtagccgtcgcgcacgagcatggcgtggttgcgttcggcggcttcggcgagaatcggcatgacggcttcctcatgcggctgcgggccgatgatggcggtgcagttcggcttgatgatgccggccttctcggtggcgatctgttcgacggtgtcgcccagccactgcatgtggtccatgtccaccgggccgatgatggccgcatccgcgctgagcacgttggtggcgtcccacaggcctcccatgccgacctcgacgatggccacgtccacgggcgtgtcggcgaacttccagatggccatggcggtgagcacctcgaagaagctcatcttcggcttgccttgctcctccatcttggcgtccaccagggccacgagatccttggtctgatcccagatgtcgatgaaatcgtcatcggacagctgctggccgtcgatggcgatacgctcgttgatcttctccagatgcggcgacgtgtacaggccggtgcgcataccgtaggcgcggcagatggcctcggccatgcgtgcggtggagcctttgccgttggtgccggtgatatgaatcacgcggaacgactgctccgggtggcccaggatgtcgagcatcaggttcatccggtcgagatccagattggtggtgttatgctccggcgggcggctcatgatgtccagttcgacgtcccgcatgctctcattgttccgattcggatgctcgaatgacatatcctcttctaacctctgctcgtgttgctgttgcaccgttcggagtgcgtatgccacttacgtgttcgcgccattctcgtcatgtctacgcatgcccgcatatattccgcttccgcatgcgcaggaagctccccttgcacaggtttgccccgcatggttcgggattcttgccttcacgcgtggagccgcactccctcaattccctctatcctagccgccggggtggtttatcgtgcgcgcacagtgaaaccgtctcatatgtcgccgccgcgcgggcggccttttcctgcagccgcgcacagtgaagccatctcatatagttgcaatgcggctcttgccgtcggcatcccattcttagtcggctgcaatccaaaacttgtatgtccggcgacgctgatgctattcagcgtcggtacagtgccagcttctggcggtacaccgacgctatgatgctcttgcgagtcggtagctggccaaaatctggattaatcccgactccatcgcctctcagtgtcgcctcctcgccaaggcatgccattctgccgtcgctgagaaatttcaacatcgtcaatcgaccatgtcttgccccggaaacgactctcacaaacgtcctctacatcatcttttgaactcgcagaggctcattcactgttatgactgctctcaccgtcggcagccgtccaagccctggatctatgccgccaataaattgcagcaaatcgtcggccacgatacaaccattggactcacgccgacgctagattccacactcagacagaagccagccaatatctgaaccagcaccgacggcgtacaaagcataagcaccgttaaccgtcaattcgccgccctctaccagctacatccgccttcgccgatgatatcttgttcgaatccccaaagcacgttgttcgaatgacattactgatggtggataagttttgtatgttatccactattccgaattagcggcctaataccttgaaattatcgggaatatctcactccaagacagccaagctccgaggctagaaccacaatggctgaaattcatacttacgctgcttcgttccggctacgctcgacgtcatgaagacacacaaagcagtggcctcgctcatatcagccgcgcagaatgagctgagatgcgtctattcaagaaatgaagcggaacagaccgctctacgccgccgtgcccagagtggtgagttgttgaaagtgtatgacggcattcccagtctttatgcaaatactgcatactgggatggtttgacgccgccggagcgaacgttgcacatggcccgcgctcttgcgcaagagcatcctcagtgggtttttggcggcttggtggcagtaagtgcctatggattcgaacatcaatggcatttgcatgatgactgcataaccatcgtgacttccgatcatggatctcgtcaatgccatcagcgcttacgacatgtctatatgcccgatatgaacaatccgaagacacattacgaggcctccggcctatccctgatatcaccggctagaaccttggtcgaggccgctatagaccttgattttcggtttgcgttgccgatctttgactcggcccttgccaagggaataaccaaggaagagatagccgccgactgcgttcaatggagaatcgattatgcccgagtattccgcctgctgcgctatgcaaacgaaaggagcgagaatggtggagaatccctcgcgcgaggcaccatcatcgaaggtcgcttcctcacgccgcgtattcaggtaacggtgaccgacccacagacgaataccgagtaccgcgttgatttcgtatggaagctcgatgacgggcgcgtgatagtggccgaatacgacggcacacaaaaatacgtggacccagccatgaccgataaccgcagcattcaggaggtggtggccaaggaacgcgcacgcgacgagggactgaaacgagccggtgccaccgaaatcgtccatttcacatacgctgacgtcatcgaacgcactccgctgcgggtaaaactgatcaaagccggggtgcctcaggtggagacctccgcatagcagtgagtcccgcgacgcgataaaccttcatcgcatgggttcacatggattcagcccgcagaatatgtcaatatcaatcggcaagctccagcccaagccaatgcccctctccttccctgccgagaacaataaacgggcccgcattccagcccgccgcactcgccatatgggcatgtccggaagaccgtccaaattccgtacttggttttaccgtcagccgtcaatcgtggcacatcgcataaagccgactaatatgaggtgggaatcgatgattcgacaacaactacatacaggagagtggcaatgggtgaagtgatcaccgccaaggacaaggaatatgaggccgaagagcgcgctacggcaccgggcgcgaaccagtcgatgagcgaccgcgtgaacaaccgctcgctgcgcccgcagtcggccgcattcaaggagttcatgaagtccggctgggccgacgatgatccggagatcaatcctctcgaatcctccaagttcacgccagcccgccttgaggcgctgggcaaggccttcccgggcgaacgtctggtcattccggccggccagccgaaggtgcgcaacaatgattgcgattacatgttccgcccggacaccacgttcgcctactacaccggtctgggttccgattacgaggccggcgccgtgctggtcctgaacccggtcgaccccgactcccccgaagccgccgccggcaagacgcacactccggaactgttcgtggcgccgcgcgccgacaactccaccgaggacttcttcatgtccgcccactacggcgaatactgggttggcccgcgtgccggtctcaaggagatgcaggcgatgaccggcatcgaaacccacgacatcgcccagctggccgacgccctgtccaaggacgtgggtgccgaagccggcgccgtacgcgtgcgcgtggtcagcgaaaccgacccgcaaatcacttcgatggttgaatccatccgcgaggccaacggtttcgccgatccggacaagaactccgcatccgacgacaagctgcacgagttcgccgccgaggcacgcatggtcaaggacggctacgaaatcaacgaaatgcgcaaggccgtggacgccaccaagcatggcttcgaccgtctgctctccgcactgccggccgcgctcgacaagccgcgctccgagcgtatcctcgaaggcgcgttcaacgccgtgtcccgtgaactgggcaacgccgtcggttacgactccatcgtggcctccggcccccacgccccgattctgcactggatgcgcaacaccggtgtggtgaagaccggcgacatgctgctggtggatgccggcgttgaggtcgattccctgtacacggccgacatcacccgcaccttcccgaccaacggcaagttcaccgacttccagaagcgtctgtaccaggccgtgctcgactcgcagcaggccggtttcgaagccgccaagccgggtgccacctactccgacatccaccacgcctgcatgcgtgtgatcgccgagcgtctgcacgattggggtctgctgccggtgagcgtcgaggagtcgctgtccccgcaaggccagcagcaccgccgttggctcgcctgcggcgtggcccaccacctgggtcttgatgtgcatgattgcgcgcaggcccgtttcgagtcctatcagggcgcgccgattcgcccgggcatgatcttcacgatcgagcccggcctgtacttccgcgaggatgatctgctgattccgccggaataccgcggcatcggcatccgcatcgaggacgacgtgctcatgaccgagaacggccccgaatggatttccgccggcatcccgaagcagatcgacgacgtcgaagcctggatggccgagcaggctgcccaagcgaagtaacctaagctccctctgatgagggagcttcttttctactaaggaggcaatgtgtccactccggaatttgtgttggaattgcgtaagaagatcggccatgatctgttgtggctcaatggcgtgaccggttgtgtactgaacgaacatggtcaactgctgttggggcgtcgttcggacacgggcgaatgggcgatggtctacggcatcaacgagccgggcgaacagccggcggacacggtggtgcgcgaaatcaaggaggagacgggcatcgatgccatcgtcaccgatttggtggccgtcacctcgtcaaacaaggtgctgacctacgccaatggcgacaacaccatgtacatggatcattcgttcctgtgcgccctgaagcccggcggcaatgccgagccgttcgtgggcgacgaggaaagcctgagcgtcggctggttcgatctggatgacctgcccactcccctagcggccagcacgagcgagcggctggagctgttccatacttacatcgagaacaaaaagcacggcgacgcccacgccctgttccagttcgatgggcagcagtactagcggatataaagttagctccctctgacgagggagcttcaatgctatgcgattacgcctcttgggctaggagctcgtggaggtgggcgcggtgttgctgctgttcgcgcgggtcgggcacgggcagggaggccagcagcttcttggtgtacgggttctccgggtgctgcataatctggtcggcatcgccgtgctccacgatctggcccttatgcatcaccatgatgcggtcggcaagcatatcgaccaccgccaaatcatgggtgatgaacaggcacgcgaagccgatttccgcctgcagtcgcttgaacagctccaacaccttggcctgcaccgacacgtccaatgcagaagtcggctcatcggcgatcagcagcgacggcttcaacgccaaaccacgcgccaaagacgccctctggcgctggccgccggacagctcatgcgggaaacggttcatgtaggcgcgcggcagctggaccatctccagcaggtcgcccacatagttcttggcatcggccacggaaccgtacttgtggtgcacgagcagcggctcggccacattctccgcgatggtcatcagcgggttgaacgaggagcccggatcctggaacacgaaaccaatgtccgcgcgcttgggcttgaagtcacgctccttgacgccgttcatctcgatgccgagcacgttcagggagccgccggacaccttctgcaggccggcgatggcacggccggtggtggacttgccggaaccggactcgcccaccaggcccagcacttcggagcggtggatggtgaagttcgcgccgtccacggccttgaagtcgggctgcatgagatggcccgggtacgtgatggtcaggttcttggcctcgacggcgatcggctgttcgcgccaatcggccttgcgctcgatcggtttgccctcgcggtcgcgcacgaccagcttctgaccgatgcgcggcacggcacccagcagtcgcttggtgtagtcgtccttcggatggtagaagatctgctccacgtcgccctgctcgaccacgtggccgcggtacatgacgaccacctggtcggcgatgtccgcgatcacgcccatgttgtgggtgatgatgagcacggaggcgtcgaactcgtcacgggcgaggcgcagcaggtcgagaatttcggcttgcacggtcacgtcgagggcagtggtaggctcgtcggccagaatcagaccggggttcagcaccaacgccatggcgatgacgatgcgctgcttctggccgccggagaactggtgcgggtagtagtccacgcgggtttcggcatccgggatgccgaccttcttcaggatgttgatggccttggcgcgcagttccttcttgtccttcatgccgtgggcgcgcaggccctcttcaatctgccagccgatggtgtacaccgggttcagcaccgaattgggctcctggaacaccatcgcggcctcggaaccacgcacttcgcgcagctgttcgccgctcagggagagcacgtccagcgaatcggagccatcgcgcttggacaggtagacggcaccggaggtggtggccgtctccggcagcagcttgatgatggagcgcgcggtcacggacttgccggaaccggattcgccgaccacgccgaccacggtcttgcgcggaatggtgaagttcacgtcctcgacggccttgatggagccggcgtcggtcatgaaggagacggacaggtccttgatatcggcgagattcttgttgttttcgctcatctctcactccttgccttccggcttgccctcgccggtccattcggaggcgacgatggtcgggtcatggtcggtgacggtggccggcgggtcgacgttcgcgtcgagttcggcaatcacctcgttgcgtgcggtcggcttctcgtttgggtcgacggacgtgtcttcgatcgatccgaccacttcgccggcggacttgcgtgcgcgcagacgcgggtcggccagatcgttgagcgattcgcccacgagcgtgatgccgagcacgatgagcacgatggcgatgcccgggaacacggcagtccaccagatgccggcggtcacgtcggaaaccgagcggttcaggtcgtagccccattcggcggcggcggtcggctcgatgccgaagccgaggaagcccaggccggcgagggtcaggatggcttcggacgagttcagcgtcaggatcaccggcaacgtgcgggtggagttcttgaacaggtgcttggtcatgatgcgccaggtggaggcgccgaccacgcgcgcggactcgacatacgcggattccttgatgcggatcacttcggcgcgaattgtgcggaaatactgcgggatgtacaccacggtgatggagatgccggaagccagaatgccgctccacaggccggactggccgtgggagatcatgatggccatcagaatggcgagcagcagcgaggggaaggagtagacggcgtcggcgatcatcaccagaatgcggtccacccagccaccgtagtagccggagaccaggccgagcagcacgccggcgaagatggagagcagcacggccacgacgatggcgatgacggcggtgcgtgcgccccacaccacacgggagaacacgtcgaatccggcggcggtggtgccccagatgtgttcggcggagggtgcggcctgcgccgggaaggacgtgccgtcggcggccttgatctgggcgtggccgtagggggcgatcagcggggcgaagagggccacgagcaggaagaacgcggtgatcgcgagaccggtgatcagcatgcccttctgccagccgaccgccacgcgcagttccttgatgatcgggatcttggtccagaacggcgtcttggtgctgacgttgagcttggtaaggcggtcgtcaccggggacggtgatcttgtcttgggatgcggtggtcatctcagtacctcactctcgggtcgataagcgcggcgatgacgtcgacgaggaagttgacgacggccacgatgatggcgataaggatcacgatgccctgcacggccacgaagtcacgggccttcaggtactgggacagcatgaagcccaggcccttccattcgaaggtggtttcggtcaggaccgcaccggcgagcatcagggcgatctgcatgcccatgacggtgatgatcgggatcagggccggtcgccaggcgtgcttgttgagcaggcgcttttcggagacgccgcgcgagcgggcagcctcgacgtagccggaattgtaggtggagatgacgttggtgcgtaccagacggatgaacacgccggcggtcaggaggcctagggcgacggccggcagcacggcgtggcgcagcacgtcgacgagcacgttcatgtcgccgagctggatggcgtcgatgatgtagaagccagtcggcgataccagacgggtgaactgcatttcggagttcaggtcggagcggccggaggctggaaggatgttgagccagacagcgaagatgagcttcagcacgaggccgaggaagaacaccggggtggcgtagcacaggatggcgaaggtgcggatgccggcgtcggcggcacggtcgcgtttgcgggcggcgagtcggcctaggccgatgccgacaatcagcgccacaatcagggcgaggaaggccagttcgaatgtggcggcgccgtagtgcgtaagaatgctgatcaccggctggttatcggtcagcgtcgtgccgaggtcgccgtgcagcaggccgccaagatagtcgacgtattgcacaatcagcgggcggtcatagccggccgcgtggatgcgctgctggagttcggcgggtgtcaggcggccgcccaaggcggcggaaatcgggtcgccggtggcgcgcatcacgaagaacacgatggtgaccagaatgaaaacggtgggaataatgagaaggaacctcgtcagcacgaagcggaagaaactacctgacagtcggttcttcttcgtcttggctttcgccggagtggtgctggaggtcgctatggcgctgtctgacacgcgatgctccttggtgttggtaatcggtatataaagcaataaaggctcccctctccgaggggagctggcggcgaagccgactgaggggagtcatacgagttgggctcccttcagtctgccgtcggcagacagctccccccctcaaagaggggagctcatgctggatcagcccttggtgacggaggcatagcggaagcggaaggaagcgtcgagggtgacacccttcacggaggtgccggtgacggcgacctgggcaccctgcagcagcgggatggtggagaggtcttcggtctcgagcttctgaatctgcttgaggatgtctccacgagcggactcgtccttctcgccggcctgcttgacgatcaggtcgttgacttccttgttggagtagccgttgttcacgaagttgccatcgcggaagaacggggacaggtagttgtccgggtcggagtagtccgggaaccatccaagctgatagaccgggtacacaccgtcggaatcgtcggtaaccacacgatccttgttgtactgggtccattcggtggactgcatgtcgaccttgaacaggccgcctgcctcaagctgggacttcagggcagcgtattcgtcggcggagacggagccgtagtggtcgctgttgtactggagcttgaggtcgaccggggtggtgacgccggcgtcggcgaggaccttcttggccttctcggtgctcggcttgccgttgccgtcgccgtaggcggacttcagcgtgtcatcgtgaccggccaggccgtccgggatgaaggagtacatcggggtgtaggtgcccttgtagaccttggtggagagctcttcgcggtcgatgaggttggcgacggcctggcgcacggccttggccttgttggcgtcggcgtcgggctgggattcgccgtagggctgaatcttgaagttgaaggcgatgaagcgctcctcaccgcccgggcccttgacgaccttgaccttggagtccttggagaggtcctcgatgtcggtcgggctcagggagcggttggccacgtcgatctggccctgctggacggccatcttcaggttggaggcgtcggcgaagtacttgacctgcacggcggagttcttggccggggtcaggcccttgtaggagtcgttcttggcgtaggcggcggactcgttgatcttgaaggcggtcagcgtgtacgggccggcaaaggccttcttggagacgatggtgtcggcgtcggtgagcttgtcggcgtcgaaggtatcctcatcgacgatcgggccggcggggctggacatgacctgcttcagagtcacgtcaaaaggcacggaatccttgaacaccacggtggtgtcgtccttggcggtcacggattcgacgttggcgagcagggagctcgggccgttcgggtcgttgatcttcttgatgcgatcgtaggagaacttgacgtcggaagcggtcaggtcgttgccgttggcaaacttcaggccgtccttgagcttgacggtgaattcggtgccgtcatcgttccaggtaccgtcatcggcggcgatgtccgggctcagttcggaggtgttgtagtcctgggcgtacaggaacgggaacacctggatctgcacggcgtatgaaccgttgtcgtaggagccggcggggtccaggctggtgatcttatcggtggtgccgatggtgatggcgttgccggaatcggcacctgcggtggtgtcatccttcacaccgccgcaggcggtcagggatgcgatggcggccacggagacggcggcggccagaatcttcttggaattcaacaggaatcctctctcataacttgtttccacgtcatcactgcgggcgtggattaccgcctgactatggtgcggatgtgttacctctgcgtttccatagtcatcgacttatgtttcgcttgtggcgaccaaggccggttttatgcggtatcgagcagtattacggattcttgtattacgacgtgaataacggtcacatggtgagacaaatatactatcatctcaccatgtgaccatgttcgtagacgaatgccttccattcgtcaaccggtcggcctactgctacttgagcttgcggcccgcgcaccacacctgttcgaccgtccagtcggccgggtccgcaaggttgaaatcggcggcgaagccgggggcgatgaggccgatcggcgccccggtgaccgggttcggccggtcgaagccgaacgccttggccggcgtcagagttgccgcctcgaccgcgtccaccgggctgaagcccagttcgcacaccgcacggcgcacggcgacctccagcagcagagtggagccggcgatggcgccgttggagaccaggcgcgcatgcccgccgaccacgttcacgtccagcgcgcccaacttgtaggcgccgtccgggcagtcggtggcggccatcgcgtcggtcacgaaggccgtgcggtgaggcgcgaaccggaaggagaggctcaccatcggatcctgcacgtggaatccgtcgttgatgagctcgatggtgacgcgcgggtcctccaccgcggccggaatcggaccgggttcgcggtgatgcaggccgttcatcgcgttgaacatgtgggtcatgatgcccgcgcccgcgtcgaagccggctttggcggtctcgtagtcggcgtcgcagtggcccacggccggcaccacgccggcagcggcgaactggcggatggcggagatgccgtggggcagttcgggggcgatggtgatctggcggatgcagccaagcttgccggaggcggggtcggcaccggaggcctcaagcatcttatcgacgatgtcaggcaccggatccttgagacattccgggtcatgtgcgcccttgcgggccagggccaggaacgggccttccagatggcagcctaggatgtcggggcggccggactccattgtggcgcggacggtgcggatgttgcggcagatcacgtccacggggttggtgatcagcgagagcacctggcgcgtggtgccatgcacggcgtggccggcccgcgccacgtcgatgccgtccggcccgtcatcgaagctcttctcccatgcgccgtgcgcgtggatgtccacgtagccgggggtcagaatacggccttcggcgtcgatgaccgcgttgcgatcggccgggtcgagccccaccgtgcggcagcagtgctcgaaggccccctcccccgtgccggccgccacgatgacgccggcggcatcggagacgacccaatatccgcgccgttcgccgcgcgcatccaccttgcgcgcgttacgaatcgccaccggagccggcttgccctccagtgccgcggtcacgcgcgagactatctcgttcctatcagacatgttgttctccttaccgctcatgcgctcccgctggcgggagccagcacacgataactcagatgccctgccaggccggcttgtgggtgtaggcgtaacggtagtagtccttgtggcgcaggcgggacgcggcctcctcatccacgataatcgtggcgtgcgggtgcatctgcagcgcggaagccgggcagaacgctgacacgccgccttccaccgtctcctcgatggcttcggccttgccggcaccgaacgccagcagcacgaggtgacgggccttcatgatcgtgccaataccctgcgtgatgcagtgggtgggcacttggttgatgtcgttgtcgaagaagcgcgcgttgtcgatgcgggtctgttcggccaaggtcttgacgcgagtgccggaggccagcgaggaaccgggctcgttgaagccgacgtggccgtcggtgccgatgccgaggatctgcacgtcgatgccgccagcggcttcgatggcacgatcataggccgggccggccagcgcgatcttgtcgccgtcttcaagcggagtgccgttaagtacgtcgccgggcacatggaccttggccgggtccaggccgagcggttcgaccacagtgcgatggatggtcgcatgataggactcgggatgggtcagcggcagtccgatgtattcatcaagcgcgaaaccacgcacgcccgaaacgtcaatggcctcgtccttgacgatcttggcgagcgcctgataggcggccagcgggctggagccagtggccaggcccagcacggcgtccggctttgctttgatcaggtccgccacgcaacggccgtagatctcgccggcctcggcttcgttcttgacaatgatgatttccggcatcggtttcctccagttccgtgcggcccgcccgatgcgagtcgctgtaccgccgcccgtcttgcggataatggcaacatccttgtcacgtccgggtgccgcgcggcgttccaaccaccgttcggcgtagcgccgattggtgattcgctatttgttaatgatactaacaattttggaccttatgaacactcacggtgtttcctgacgcttcacacaggtacactggaatttattagtgaagtttcataacagtttcaacgacgaaattgcgcttcaccgtctaagctgtgtatggaacaacaatcgccgtccactcgctcaccatcaggcaggaggaaacatgtcatatctcggtctcaacacaacgaccgacgaccatgcggccaaggcttcccccgccgatgtgcgccgcaagaaccgccaacttatcttcaggttgttgttccccaccaaccagtattcgcgcgccgagctcggccgacgcaccggattgagccgcgtggccgtttccgatgtggtcggtcggatgctggaggaaggattgctgcgcgagaccggtcaggcacccagcggcggcaaaggcaaacgaggcacactgctaagcatcgatatcgatcgactgcgcatcatcagcatcgacctgacgcaggagcacctgctgcacggcgcagtcaccaatctgctcggccagccgctgcgtcacgccgaagtcaccctgaacaccggctcattcgtttccgtggatgtgatcatcgagctcattgagaagatgctgggcatgtccgatggcgaggtcatcggcatcggagtcgcctcccccggcgtggtagacaacggcgtggtccgctcctccacgatgcgcggctggaacaatctcgacctgtccacgccaatcgccgaacatttcggacttgaagtaaacgtcagcaacgacgccaccgcagccatgctcaccgaacgtttctttggccaaggcgggccgaatatgcttttcgtgcgcatcgaaagaggcatcggttcggcgattctgctctcggacacgccggtaatcggcgaactgcacgcggctggcgagctcggccatatttccatcgatcttgacgggccgctgtgcccttgcggcaagcacggttgcttggagacgatgatttccggaaccgcattgaagaagcaactcagcgcagcagacgtggagcagcatcagggtatccttgctcgggcgggccgctatcttggccaagccctggccatgcctgtgggccttttggatatggcagacgtatgcgtctatggccagccgaacatcatcaacgcgacgttcatcggcgcggcccagcaatatctggatgccgccacatcctcgtccttccacaaacacacggtgattcggcgctgcgaatgcggacctgacatcaccgtacagggcgaggccatcgccgtggtcttccaacacttggccaaataaaagccggtcaccccggcaacgaaacgcgcaagaccaagcgcggcacagcacgacataaagcgatataggactgcgtgggagatggggcctcggagacaaatctgaggcctcatctcccatgccccggcactatgccagtgctacgccgccatggcggcaccgatggctccgactggttggccgacaggtgccagacgcagccgggccggcaggtccagcgtttcgaggaatcggcattgcgattcgcgccggcgcagctcagccgtgatcacctcgaccaatggttcgccggttttggccatgccaccgcccaagatgatgagtcgcggatcaacggactgagccaggatttgtatggtgtcgccgatggcgcgcactaccatgtccagcacatcgacggccttggcctcccgctttttcgcgcgacgaatcaggtcgggcatcggcgggtcggcgttgggccacagacgccccacggatgcgcccgagcagactgtttccaagcatccgtattgcccgcaagggcacttgaggcgatgaggttcgactgggatatggccgatttcgccggccgcgccgctatagccatgcatcagcacgccgttttcgacgatgcccgcagccagtccggtgccgaagttcaggaacgcaatggtaccggccatgccgtccgcaccgcccaatacggtggccgcgccgacggcggcggcattgacgtcgttttccacatgggccggcacgcccgaacgctgcgagaccaacggccccatatccagcgagaccacgtcgagattcacgatattgcccacatgcccgctggccgaatccaccgtgcccggggtaccgataccgatggccctcacctcgtcaaaacgctcacccgctgcctgatgtgctacagcgacgatgtcttcgatcacggcatcgttgccatgcctggcgggaatacgggcggaacccaataccgtgcccattgcgtcaaccagcacagcttcgatttttgttccgcccacgtcaacaccgattttgagattgttcatagtgttttcagacatcagtcctcccctgttcttcatcgaacgtttcgcttgatatcagtgtgcatccgactattgacaaccatcttaacaaattaccccaagacgacactcacatgcacgacacaccgaatgacatattgattgcgtcaatcaattaacagcgttaatatcttaatcaagttcagattcaaagacgagcggaacaactcgcagcggtgcagacaaggaggacttaagaccgatggcaacaaacaccacccacgccacttcccaggccagtgtctccgaatccaaccgctcccgcatcgtcaagcacctgtatcacaacggcatcagttcccgcgcgcaaatcgccaaggcactggaactcacccccgcggccatcaccaaaatcaccgcacgccttatcgaggccggcatgattgaagagaccggcgatctggaaggctccaagaaccgccgttccatcggactcaagctcaacaccacgcacttccgcatcatcggcatcaaattcgcccgctcgctggtgcagatcggcgtgttcgacctgtgcggcaacaccctgagctttgaaaacctgcccacggtgtgcgacaacaccatcaacgactccatcgtcaccatccaccagcgcgtcgaacaactgctcgacaacgacccatccatcgtggccatcggcatggcagtgcccggcccctatctgcgtaacgtaggccgcaccgccgtggtgtccaacatgcagggctggcgcaaaatcaacttcatcgacgaattcgccaccgctttccgcgtgccagtgttcatcgaacaggacgcccgcgccggcgccctcgcacattatctcttcgacccgtcggtgcacgccgacgacaacctcgcctattatctggtcggcgaaggcgtgggcctcggcgtcatcgacaacggtcgcctcatcaacggcttcctcggtgccgccaccgaaatcggacacatctccattgacgtcaacggccgcccctgcgattgcggcaacgtcggctgccttgaacgctactgctccacccccgccattcacgatacgctcatcgccgatggcaccgtggttcccggcgcggccgatatgacccacaccgaagccgcccgcaccctgttcgccaaagccggcgacggcgacgaagcggcaatcgccattgtccgcgaagtcgcccgatacgtcggctacggatgcgtcaccatcttcaatggatacaatcccgagcacatcatcatcggcgacatcgtgtccgaagccggcccgatactgctcgatgaggtgcgcgccacggtggccgaacgggccatccccgaaatcaatgcctccacttccatcagcctatccaccttgtccgccgacgcggcggtctccggtgccgcagcagtggcagtgacccaattcctcgaacacccctcggtgttcttcgacgtctcctaaaccaagcgccgacatcacaagattttccatacgaaacacccgataaaggaaacaaaggaaaggaaaccaaccatgactaccccgatcgttctgagcctcggtgaactgctgtgggacatgctgccgagcggcaagcgagccggcggcgcccccgtcaacttcgcctaccacgcgatgaagaacggcaccgaaggctgggccatcagcgcggtcggcgaggatgaactcggcgacgaactgattgccaaggccaacgaggccggtatcaacaccgtcatccagcgcaatgcctggccgacctccaccgtcgaggtcgcactgaagaacggcatcccggagtacaccatcgtcaagggcgtggcttgggaccacatcctgtacacccgccagctcatcgacgtggtctccaaggccgacgccgtctgcttcggcaccctggccctgcgctcccccgaatcgcacgccaccatcacggagctgctcaagcacaccaagccgggcgcgatgaagttcttcgacatcaacctgcgcggcgaccactactccaaggaacttatcgaggaactcctcaaggcggccaccgtcttcaagatcaacgacgaggaactcctgctgctgcgcgacatgttcgacatccgcggcacctccggcgaagatgcctcccgctggttcatcgaggaattcggccttgactacgtgattctgaccgccggctccgcctactccaccatcatctcccgcaagggcgaggtctccacgctggacactccgcacgtcgaggtgaacgacaccgtgggtgcaggtgactccttctccggcaccttcaccgcccgcatcctgctgggcgacacgctcgccgaagcccaccgcaaggccgtcaacaccgccgcctacgtctgcacccaggccggtgcctggccgcagtacccggccgagatgcccgactacctggctgaaatcggcaagtaatccaaaaccacctatttccccgatggctttgccgtcctataccggcaaagccatcctgttttaaaaaggagttaccatgtccattcgtgacaccgtcaccggcgtccagcatgtcggcattccgaccacggatctcgaaggcaccatcgcctactacgagcgtctcggcttcgaatgcctcggcatctatcccaacggcgaggaccgctgcaccttcctgcgcctgaacaacctgaccctcgaggtgtggaccatgaaccccacgcctatggaaaacggcgccatcaaccacttcgcgctggattccacggatatcgaggcgtccttcgctgaagcgcagaagctcggcctgaacttcgcggaaggctccatccagcacatcgacaccttctggagcaacggcatccgttacttcaacgtactgggcccgaaccacgaggtcatcgaattctgccaaatcatgtaacaccctgatggaacccggcaacaggactatcactattcactagtcatcatccattgatcgatcgatctgtcatacgtccatttatagagaaaaaagggaatacatatcatggacaagaccgcatccaagaacgtggcgtgggtggaaagccctgacggctaccttgatcgcacgccagtattgcaattttcaatgacttcggtgctgttcgccttctaggccatcgccgcaagcctcaatgacattcttatcacccagttcaaggccgtattcgacctgagcgacatgaagaccgcgttcgtgcagtccgcattctatgccggctacttcatcgtggccatccccgcctcgctgttcatcaagaagaccagctacaaaatcggcatcatgaccggcctggcgttcttcgcgctcggctgcttcatcttcttcgtggaccgtatctccgccagctacctgctctcgaaggtccgcgagactcgcgtgctgaccgtctacatgattatcggctgcgtgattcttctcggcaccgccttcatcctgccccgccatcgagctgttggtcgtcggcctgtacttcctgactgaattcaagcgcgacacgtacaccccgccccagctcaaggccatggacgagaagaacgaggcctgattccgccccctttgttcgtcattcgtgtgacttcacgaatcgactgaccgcaaccggtgagattctccgaacaggaaatctcaccggttttttcatatggtgtactcacggccacgctcttcacatcctttcgcgtgtcttcaactaaagcggtttagaataatgctgttcccttgatatgtatatccctcaaacaaagaagttgaatttatgacgaccaccgcgataccgaagtcggtctcggatttcttgcagcgcatcacggacctatgtggcaccgaacacgctgattgggccgagaacttcaacgcctgctttgccgataccctgaccaccacggtcaaacggcatgacgacggcaccacatttctgctcaccggcgatatcccggccatgtggctgcgtgattcgaccgcgcaattacgcccttacctagcccttgccgccaaagacgacgacattgcgaacttgatcgccggtctggttcgccagcagttccgctacattaccatcgacccgtatgcgaacgccttcaacgaggaaccgaacggtgcctcctgggacaaggacgatcagtccgacttctccagcccttggctttgggagcgcaagtacgaggtggattcgctgtgctaccccatccagttggcttggatgctgtatgcgaacaccggcaacaccggtcatttcgatgccgaattcattgccggcgtcaagaagattcttgacgtattcgagaccgagcagcatcatgaacgctccccgtatttcttcatccgcgacacggacatccccaccgaatcgctgagcaataacggcaaggggtcgccggtggcgtacaccggcatgacctggtccggcttccgccccagcgacgacgcctgcacctaccactatctggtgccctcgaacatgttcgccgccgtggtgatgggctatctggaacgcatcttcggcggtgagattctgaatgatgccgatatcgccgcccgtgccggcgagttgcgccgcaccatcaccgaaggcattgaagcccacgccaaaacgacgaaccgcaatggagagacgatctacgcattcgagaccgacggcctgggccacgtcaatatcatggacgacagcaatgtgccctccttgatggcggccccttacttgggatactgcgcaccggacgatccgacatatctggcaacccgacgtacgctgctcagcgacgaaaacccgtactactacgagggcgagtatctcaagggcatcggctcaccgcacaccccgccgcgctatgtgtggcccatcgccctgtctatcgaggcgatgaccagtgacaacaaggacttcaaggcgcatatcctcgaccgtcttgtagccaccgacgccggtacacatctcatgcacgaaggcatcgacgtgaacgatccgaccaagtacacgcgcgaatggttcagctggtcgaatatgatgttctgcgaactggtcatggactatttcgacattcgcgtgaaacactaagacgtgcccgctgaatgctcattgtgcacccaccgcatgttctcgttaaggaaaggaacaatcattatgaccaataacccacgttatacgctcggcaccgaagccaaccgcattttcatggcttccgaaacctacgagctgctgaagttcggcaaaggcttcccagcaccgaacggcggttccggctggctgaacgccgacggcaccctcgacccctcccacggcgtcgaaacgtggatcaccagccgtatggcccatgtgtattcgattggtgccatgctcggatacctgggtgcgggcgagctggccgacgcggcgctcaagggattgaccggcattctgcatgacgacgagcacggcggctggtatccgcaggtgttcgcggacggcacccatgcgccgggcaaggtctgctatgcgcatgccttcgtgattctcgccgcgtcctccgccctgctggccgggcgtccgggtgccaaggaactgcttgacgaggcacttgccacgtatgacaagcatttctggaatgacgaaatcggtttggccgtcgatacctggaacaccgaattcaccgagctcgacccgtatcgcggtctcaacgccaacatgcacaccaccgaggcattcctagccgtggcggatgccacaggagacaacgcctatcgagtacgcgccggacgcatcatcgatcatgtgatcggctgggcgaagcacagcgagtggcgcatccccgaacatttcaagtccgattggtcgctggacctcgaatgcaacgtcgacaagaaggatgatcagttcaagccgtacggcgccacgccgggtcacggcatcgaatgggcccgcctgatcacgcagtgggcgttgagctcctttgccaaccttgacggagcacagccgtacgtcgacgccgccgaacacctgttcgcgcgtgccgtggccgacgcatggaacgccgacggcaccgtgggactcgcctacacgaccgactggaacggcaagcccgtggtcaccgatcgcatgcattggacgctggccgaatcgttgaacacttccgccacgctgtacgcggccaccggcgaggagatgtacgccaactggtatgccacgttcgcccagtatgtcgacgaacatgtcatcgaccacgagagcggctcctggttccaccagctcgacaagaacaaccacgtgatcggcacggtctggccgggcaagtccgacctgtaccacgccttccagtccacgctgattccgttcctcgacccggccgtatccatcgccaccgcggtcaagaacgcggcctgaccggcaatatcttagccttcttatctcctccttcaacgacgttggccccccgcttgataacgagggccaacgtcgtatggattggaagtgctgactcagaatcggtggtttctatattccacaggagttacagggtttggccgtgctgtccctgaccaccagtttcggggtgaggattcgacggttgccgctcacctgttcgccggcgagcactttgagcagcagtttcgccactttggcaccgtattcactggcgtcacgatgcgctgaggtaatcgacgggtacgctgcctcacaaataaagctgtcttcaaagctgacaatagcgggcaacccgttcggataacccgcagattgtccctcccctgttttcagttgcccggtggtatatgcttcggccatggcatgcagactggccgcggcaagaatttccgtctcgtagatgaatgcagtaggaggcttcggcgaacgcaacatctccagcgtaagcatcgcggcctgctcggcatcgaaattcgtgaactcgatgttgatggattccagtttgcgccgttttgcgaacgaccgaaacgccgacatacgcccctgcgaataatcgagattggaatcgccggacagataggcgatacggcggtgccccagtgacgacagatgttcaagcacggtgcccatggtgcgcgaatcatcgatggacagcgacggtacataattgttcggatcagggccaccggccagaaccgcacgcacacccagttccttcagcagtttcgggcgtggatcgtcggctcgcagatcaaccagaatcaccccgtccacacgcttgcgtgacgcccagtccctgtagacgctcatctcctcgttcagcgaacggcaagggcgatacagcaagccgtatcccttagggctgagcgaggtatgcacaccggccatgaagtgcaacatgaaggtttcgtccgtgagtccctgtgcggagcgtgcgggggcaaagcctatggtcatggttttcgacgagcccaacgcttgcgcggcatagaccggcgtccacccaagtttggccgcagcctccttgactcgtcgtttggtttccgcggaaacaccaggccgatcgttgatggcaaaggacaccgcggtttgcgaaatgcccaactcatccgcgatgtcttttaagctcacacgctgcgtgcctgtggacgatggtgatgcctcgcgagcaaatcccatgaataatcctccttgcagccacgctgcgaataccacgctacaacagattatttcccactttgggccgcatgtaatcagctgtgttctaatacctatgatatcaacaactaaaacgttttagtctatgggtctcagcatatgttcggatataaaaagcgggatatagggggtgtctacagggacaaccaccccatatcccgcttaaggcacgggtatcaacgcacccgcatacgcagcgaaactattccatcttgctacgagcacgaagcaccaccgtgcccgctccgagcaacaccactgcggcagtcacaatcgcaataatcgaagagcccgtcttactcagcgaagagtccgatgcgccattcttatcattgttcttgttgttgttctggccaggcttgttgtcgccgggcttattcggcttgtccggctggccgggcttgttcggggtcgccgcgaccttggtgaattcgatggcgacaccctcaccgatggacttgtcgcccagtgcggccttcaccgtgtacttgcccaccttcgtggacacgacgttcagtgaagccacgccagcggcatcagtcttgacagtggcgttgccgtcaacggccgtgacaccctcgggcagcgtaaacgccacctcggcgttggtcagcggattgccgaacgaatccttgaccgttgcctgaatcgtacgtgtagccttgccgtcggccacggccgagccgtcaacggcggtcagcgtggactccttggcatccggctgagtcgggtcagagaccgtgcacttggccagttcgtcggcggtctgaatcttcaccggttcggtcttgttgccgttgtgatcctcgacctgcacccacagttcatggccagaggggatggacttggtgtaagagctcggcgtagtgcgaccacggatgatgccggtgattggcggagtgctctgcgagtaggtgtaattggcacccagctgcttctcctgcttttcaccgttctcgtcagtccacttctcggtcatgtagaggtagcgccagtcttgagtctccggacggaccagagtgactctatcgccattccatgtcaccgagcaagccggatacggctcaatggtggcatcggcaaatacacctgttgccgtggcggtagtgccgcctgcgttatcgacggtcaccacatagcgggaaccgtcaaccggcgcattcggaatcgtcgcttcgctcttatcggcagagaccttgacggtctgggagtacggctgcgcggcgtaacgccacgaaccattgtcagacttgacggtcacggtcttctcgccggatacctgcggattggtccaggagaccttgacgttaccatccttgccgggttcgactttcacgccagacacggccgctgcttcgttcagcggcgcttcggcggccagcgagcgcgaaccgtccgcacccacggcgtacagcttcagcgtgccggtcttggcaggcaggtgcttgacgtacagggtgtcgtcgtaacggccaccgaggaaggtgttgtccaagtagagcaggtagttcttggcagtagagtaatcggcgagatcccacttgacggtcagttcgtcggagtccgcgtaggcgcgttccacttggaagttcgtcggagcagccggcgtgtaggcagcaccgtcggtgacggtaatcttgccgatgttcacctggtaattgtcgattgggttcgccccggccttgacgatcaggcccagggtggcgatcttcttacccgcgtactgagagaggtctacagttgcggtcttccagccgttgcttgccccaccgtctgccatgtccaccggcactatagtcttggtgtcgtcggcgaaaatgaggccgagttgcagcttggaatcgtcgctgttgagcttgttgtaggtcagttcgaccttggagccggcagcgacgctcaagtcggtcttgtagagacggacggtgttgtcgctggacagcttgccgctcaacaccagcgaatcgccgccttcgtagccgccgaccttggtgtagttaaagcgtggtgccgcttcatatttcttgccatagtcgaagtcggcttgcagcgggtcggaatcggcatcaatccaccactgccatgtcggcagaatgtcttggaggttgatattgccccactgctggttgctggtctgttcgccgttgtctcgccattcgagaccatgaccggtgttgaacgatgtggagaagaccggaccgccgatgacggagcgctcggcgatctgcgaagcgaaacccttccagctatcgctgctcgtaccatcatcaatatacggatcagatatatccgtcgtgcccttctcaccggtggacgaaccagtccacagacggcgttcgcggtcgaatacctgattctgatacttcgggtagaccttcttgtcgtcacccaactcgtgggagacgaaatcggtgccaagtgccgcaaggctcacatagggcttgccgtcagcgtcaaggttgacattcatataattcgcgttgctggcgatgctaccaaatttcttctgtccggcctcgatacccgcgaataccgcgtacttcggatcaatgccaaggctcttggcgtgatcagctgaatcttgtagcatgttgccgctgaaccagtagttcaggaagatcgaatcagagattttacccttgttcggatcctgcacccacggcgaattggcatcgttgaacatgttttgatagctgacgccgccattcgggtatgtggcggagtcgtaccactggatataaatgccctgatcgatgatctgcttcatgaagtcttggtaggccggcacatcagcagaattcacactggattcctggttaacgaagtaaccatcaaaaccatagtacttggcaatctccaccagcttgtcagccaccggataggtgccgtcggcacgcttgccttgaagcaggtccttataggtctgttctcctcggtcgttgccagaatagaagatcgtcgcaatcgacttcgcgccattcttgtgcgcgacattggtatatgcggcattcggcagattcaacgtaccgaactcaaaccatttctgagtccagtcagactgggccttctcgtcgtagaggctctttggcacgttcgcagtcggctgaccatgccaggtaccgtaataatccgtgtactgccagtagttgaacaggtactgcgagaacacgttgttgtcgtggaacgactcgaagaacgcgttgccgtagtcgccagcaaggttgaacatctccgtatcggccggcaggttcgggtctttctgcgtcgcggcgttggcggcgatgcgggtctgcaacggtacacgggagcgcaggtattccgagtccttatccgcgtccgggttccagttcagaatatccagaccggtatagccatgctgatatggctggttggctcccgcagactgctccggatggctggtatcggcatactggcctccccacggcatggtgtcggtggcgcttgccggtgcggccaatgccgccagcgtggccatcgacagcaccgctgccaagccagaccgcagccatttcctgtgtcgagtccgggcagaagcacgcccagcgtgatcacctgatgacaatctcatccataatctcctttgatttcctccgactcacgccggaaatcaaccgtctatgcggcttgagtagacgggggctcaaaccggtaggacggtttgagcccacgggatacggcgatatttcaccaacgccatatcccacattctctttttctctcacccaccgaccatatcggccgcaatgagtaggtcatgagacttacggaacatacccctctccgacttgtctcatgcacatcgtcagcgatgtatcacgatgcttacgctggtatcgcagtcgtctgtatgtcgggtatcatcgttattcaaagcggctgtcagggcaaacgtcacacgcacattgtcatcagcttcgtccatcagccgttcaaagggtaccgagaacgataccgcgtggctttcgcccgcctcaagcgtcagggcaacggaatcgaccagcactgccaagcgtgggatgcgacgaccgccactgacgtgtgcgaagaggttcaccgaaccggccgtcttatggtcgccggcatgtgccgtcacctgcaccaacacctcattcgcgcgggattcggcatcggcatgcatcccactaaacgtcactccagccaaagaaccggctccgtagccaaactcgcgcaataccggttccgccgcatccttgtatacgtaggcggcactttgccggtcgttgtatcgaaccggaatggctgcgggatgcgcaggcagcgttacgggaaggcggcccggcaaaccggcaccgtcaatcagcacatcagccacggcatgcggaccatactggccagcatatccgacccaaatcgtcacggcggattgacctattacatgagtcagcacatgcgccctgccgcacaccaccaccgaaacaaccggagcggtggtcaatgccacgacttcgtccagcatttcatcctggtgccaaggcagacggatgtcggacaaatccacgccttcaccgcaggtggcaccgtattcggctacggcctttgccgcaccattgtcgtcgaattcactgtcatagctgcgttcgctggtgctgccgcatacgaataccacggctgccgcactcgcccaccgatcggccgacacatcgctcggcttggccgccaagcaaacccggtctttcccaaggcgtgccaccaattgccggtagatgcttgactgctcatcggcgggcagaggggcggtgtaatcgcccaggaagcagccgaaatcgtcggcgaatgggccggcgacaatcacagggccggcttgggcatcggtcagcacaccccgaatgctgtcaagcgtaacggcagagcggccatcattaatcagcgttatcgcctcgcgggccatgcgcttggcctgctcacgcccatccgcagtggcctgcgcgatggcatcggcatctggcatggcaattgcggcggtatcggcaccatcttcgggcaagagaccgaacatggctttgagctccagcacacgacgcaatgccgtatcgacggcggccgccacctgttcgtcatccacatattcttcgaggcgcgcgaatccttcatcccacagggagacatccacaccggcaagcagtgcggcgcgtccggcagcgggaatggagccggccatatcttcaagccggtccacggccagaccatcggccatcacgatgccatcaaaaccgagctggtcacgcagataatcctcgagcaaccacgggttggcacaacaaggcacggaatcgatatcgttgtaggcagccataaagcccaaggcaccggcacgcacgccagcggccaccggcggcagatgaatctcgtgaagatcgtgcgggcccaatacggcggactgcccgttgcggccacccacagcctcgccttgcgccgccaaatgcttgagcaccacggccactcccccgcggccgaccttgctgcgatgctcaccctgcataccggtaacgatggcctcgcacatgcgggaggccatcagcgggtcctcgccgaagcattcctcgcaacggccccaacgcgggtcgcgggcgatgtccaaaccggataccaatgcaatatgaataccgctggctgccagttccgcggcgactgcggcttccgcttcctgcactccttgcgaatcgaatgtggcacccaatcccagattggtgggcagcaccgcgccgcccagcgcctgatgcccgtgaggagcctcttcgctgagcaatacgccgatgccatgtgcaccgcgctccaacacggtttgctgcaccacggcaaccgcctcaggccgttcctcagggcgtatgccattgccccaatgctggcccgaccacgggtcagctcgcagcaggccgtacaaagcgccaagcccgccccaccggtcgatctcttgcttgagctcgtctgaggccacaagccgtcctgcggcattgcgttctacggacttccaaccgaacagacgctggttcagctgaccaaccttctgcgtgaagctcatcgaatcaatgagtcggtccactgcggcgtgattgatgctcatcgggtgcgccccctctcgtatataacttctcgttcttcccgctcttcggcgagtacagggtcttatgttgtgcactgcgcaccgcaattgtgcgcacggcaattgaaaatatccggttgcggaacaaggagtagatgattccacaaccggatatcggtttagtcagccgtttcgaacgatgggtccgaaaccgcagtgtagtagcgggcggcgtaggggcgctcgtcggcgtgcaattcaaggatgccgcgacgcgcgagttccgcctgatcggccgccacctgcgaggtgatgatggtcgggcgctggcctgccacctgcagcttcatccacaggtcgcacaccgaacctcccgggccgagcgcactgcggttcaccgggtttccggcctcgtccacatcaaccaccacggcgacggtcttcggctgagccggcaatgcggaacggtactgtgcggcgagctccccgaacgtacggccaatcggcttcagctggccttgctcgtcgaacaagcccagagagtgctcaaagaacgggaagtcttccatgctggcgggcacatcgtgcgagcaccaccacgtcacaccccacaggttccggcaatccatggcacgttcaacggtcttgcggcagaattccggcgtgtagtcggtttccagcacattctccggcgcaccgacttcctgaagccacaccggacgctcggaatccttgccgaacgccttggccagctcagccaagtacagtgcgtacgacgaacattcctcactggtagcgccgtatccttgcgcgataccgttaaacacccaggagtgaatcacggtcatatcgcccttggtggcagactgcaccggcgtgaacgggtgcccgtcaatgaaccaagtgccatcgttgacgctgtacagtgcgttatgcccttcgccggcaacggccggaagcagtgcattcagccatgcatcgatctgctggctcgtggcgctcatcttcgtaggatgcggcctgtcagacagctgattgacctcgttgcccaaggtaaggcccttgaacgcgggttccttggacagctcatcggtcatggtcttgaccagttcacgctcggccgcaacggcgtccgcatcggtgaacatgttgcccgcatgccaggtgaccagccatgaaggcaggaagtcgaagctggacagatgcccttggaacacgtccacataggcatccaaaccgtgctcgccggcgatgtgcaccatgcggcgcacatccgccacgcccttcttgttgatccaagtgcgattaggttgcagatacggccagatcgggaagatgcgcacatggtccatacccagttcgctgatctgcttgagatcgttgtcgatgccgtcccagtccgggtcgagccatgcgtggaaccagccatgcgacggcgtgtagttgactccgaatttcattggagtatctccttttttccagtccgctcagcccttgagtccgccctgttccaagccacggaagaagtagcgctggaagcagcagaagaagacgatgatcgggataagcgagacgagcgcgccggcggcaatcagtcgcggatcttggatgaacatgcccttgagtcggttcatgccgagggtcaaggtgtacttgctttcatcggagatcgcgatcaacggccacaggaagtcgttccaggcaccgacgaatgcgaagatgccgacaacggtcatcgtgcctttgacctgcggtacacagatgtggaagaaccgctgccataggttggcaccgtccaccatggccgcctcttcgagttccattggaatggatctgaaggcgttggtcatgagcaggatgttgatggcaccgcacaggccaggcagtgcgactgccagcagcgtgttctgcaggtggatggagcgaatgatcaggaactgggagatcatcacgccttcgatcgggatgaccatggtgcccatgaacatggtgaacaccagtccgcggccacgccacttcaggcgtcccagtgcgtagccggccatcgtggagaaaaccacgttgccgaagatggagatcaggcagaccaccagcgtgttgagcatgtagtggaataccgggacctgcttgaacacggaaatgtaattctccagcgtcggggtcttcggcatcaggtagggaggcacggcgtagacgttgtcgcccttgcccttgaacgacagggacagttcccagacgaacgggccgacgagcagcaggaacatcagaatcagaatcagatactggacgactttgccgacagtgaccttatgcgtgttggtattcatcagtcctcacctcgcttttgtacgatctgctgcacgatgagcatgacgccgacgatgacgagcacgacgatggagatggcgctcgcgtaaccagtgcgggcctggataccggtgccttcgcgcttgataagcatcgacatcgtcatatccatgccgccggggcctgcggagccgttggtcaacacgtagatctcgttgaagactcggaatgcggcgatggtggacagcatcatgatgagcatcatcgtggagcgcacgccgggcattgtcacgtagatgaactggcggacagggccagcgccgtcgagggaggcggcttcgtaaagggattcatcgatgttggcgagggcggtcaggtagatgaccatgtagtagccgaggcccagccagattgtcacgaacatcgagctgaagagcacgccccatcgatcggtgaggaatggaatcggcttggagatgatcttcaatgccttgagcacggagttgaccagaccggcggaatccagcaggttggtccagatcatgcccaccacaacggcggacataaccaccggcatgtagaaggcggtgcggaagaagcccatgattcgggagttgcccttgaccagataggccagaatcaacgggaggatcaccatgaacggcactacgcagatcacgtagatcgtggagttgagcagtgcggtgaggaagtactcgtcgtggaacagtttgatgaagttttcgaatccgacgaatttgcccggacggagcagcgtggaatcggtgaaggcaagcctgaaagtgttgagtgccgcgaggacgatgaaaacaaacacaatcacgaatgcgggcagaacaaacaagtaaggggcaatgatggtgccgaacttgcgatcctgcttcttgccgtgacgcgtattcatcggttcaggccggtcggaggccgtgcgggcctccgacctgtcagcggcgagtgccgcgttgctcactgtgcgagcttctcgtttgcgaactcgacggacttgtcaagggcttccttggcggtctgcttgccctgcatggcgagggcgatctgctgctggaagttcttgtagccgttgttgtcggtaaactcggccggacgagaaccgtagccgtccttgacctggtcgagcgtgatcttcagagccttgccctcaagggtgctctcgtcaatgctcttgtagtagtcgtcatccagaccacccttagcggacgggaacacggaggccttcttgtcgaactcgatctggttcttctcgttggtcacaaagcgggcgaagtcgatggcgacgtcggggtgcttcgagttggcgctgatgccgagcatctcgtaggccacggaagcggacttgccgtcgttgctgatacgcgggccgactgcgaggttcttgtagaggtccggagcgttctgcttaaagccgtcagcggagtaggcggagccggccatggagaccaagttgccgcgctggaagagatcggcggcctggctccaagaggagtcgagggcctccggcgggatgccgcccttcttgtacagctcaacgaagcggctgatctgcttgacaccggcctcatcattgaaggtgtacttgctgtggtcatcattcatgaaggacttgacgcctgcggtcatcagatcttcggcgttgtaacccatcgtggtgcccaggtagacatccttgcagttctgcacgatggtgtcgccggcggcgaagtattcatcccatgtggtcggaatcttgttcggatcaaggccgcacttctgcatgagctcggtgttccagtaggtcgggccatcgttgacataccatggcaggccgtaggcacccttctcgacgccattgccctgcatggtcacggacttccatgcgccttcgtagtagtccttttccgcatccggagcctgcttggagacatcgagcagcgcgccagccttggccagaccgtacaggatggagttgccgccgtcgacgatgtccggcagttcgccggccgcagcctggctggacagcttgtcttcgtaaccatcggacggggcgtcaagccacttgacggtgacatccgggtggtccttctcataggccttgatcagcgcctcgaaatacggggtgtacttgtcgttcttgaggttccaggtctggaaggagatctccttcttgccgccgtcatcccccgcagttccgctaccacaggcagccaccgatacgagcatcgcaccggcaccggcgatggcgaggatcttcttcatagaaaacatacgttttcctttccttttggttcctttttcgccccgccctgctgtggacggagaaaacctaatcgttgtgttccggtacagtcacccgtcgcggtgattgacgtggtatcacaacctttattcagttctcatcgctgagactaaaccgttttagtttccagccagttatgaacctgttaactaaatcggtttagtaagaatataacacaatcgaaacatgcacgcaacgaattcatccgcgcgtgtcgcattgatatttgcccaacgaaatcgtcccctcttctcatacaacaatgggccgcgcccaaccgtatggcagagccggtctactccggttccgttacggctgggcgcgacccaaaatatcgagcctaggcccaatatcccttatcggcgaatacgcagcgtggtgagctggaacggcgccaacgagacgaccgcaccgtcggcaggcatcggctcgtcgccggcgagcgcgcgcggcaattcggcgtccagttccggctcctccatgagattcacctcctgcacgctggccttagcatcggcgagagcggcgtcaaggcgtagtgcggccgcggcattgccgccggcggcctcgtacaggcgcacaatcagatcgtcggaaccgtcatcggcgagcttgacccagtccaatacgatggtgccggtgacgtcggtgagcgagaccagcggggccaagtcaggcaactcccctattacagggctgttgagtcgcgccgcctcgtccagcactgcgttcatatcggcgtcagcgaccagagaccatgcgaaggagtgcgcgccttggtcggtgcgtgggtcagggtacagcggtgcggacagcagcgacaaccgcaccatggtgccgcggccggtgccatgtgccgtatcggcgtggatggggctgacgtcggagccgtaggtggaggcgttgaccacagcggcggcatagtcggcgtcggcgatacgcacgaagcgatgcgtgcagctttcgaatttggcatcatcgctgcgcgtgttcttattgatcgggcgttcgaccaggccgtattggcattcatattgcgcgttcaccgcttgcacggtgaccggcatatccactttgaggaactgttcgacggcatgccagtccacatcggcggtgaagtccagtgtggcggagcccggccttaaggcaatgcccgtacgaatttcaacgcccttcgcgcgagtgacagcatgcacgacggccccaccgttggcggtttcatccacgcttgtaatcgatgcctcgctgagcgcgttggcggtgaggaatgcatcgcgttgaatatcccaggcgtcccagtggaagggttcgtctttgagcatttcgtagcggcccagtcgggtgccggctggcaccagttcacgattggttcgctgatcgacgattgacgaaacggtgccgtcggcttcaatgcgcacgtgcagttggccgttgtcgagcacaatcgcatcgccgtcatgggtaacggcgacccgagccatggatgcggttcccgcttcggctcggctcgaagccgggcgtaccacccacgcctcacaggcttggcgggaatatggggcgattacggcgtcggttatggttgcgtcatcgggttccacggctgcgatcgcgcgcccggcttcaagggcgatctcgttcagccgagcgacgtcacgcgcgtattcgacccgcgcctgacggtgtacccatgcgatggccgaaccgggcagaatgtcgtggaactggttgagcagcagggtcttccagatacggtccagttcctcacgaggatagacgtaacctgggttcttgatactggccacggcgcacaggtattcgacgacacgcagcattgactcctcttggcggcaaccacgcttcatatcctgctgtgcggtgagtgtgcctcgatgcagttccaaatacagctcgccatggaagaccggtgtctcgccgcgggcatcgtccacgatatccttgcgcacgcggtcgaacagctgatcaggagtaccgaaatcgattttcggcgcaccggcgagatcatggtcgcggcggatgcgcgcggtcatctcacgcgtgggaccgccgccgccatcgccgaaaccgtagagcaggattgcgttgcgggaaagatccttgtccaggaaattgcgctgcgaatacatgagctcgcgcatgctcatcgacgagcagtaggtgtcagagggtgggaagtgcgtgaggatacgcgtaccatcgatgccctcccacatgaaggagtggtgcgggaacttggtggtgtcgttccacgagatcttctgcgtgaggaaccagtcgaatcctgcacggcgggcgatctgcggccaggagccggtgtagccgaaactgtccggtagccagatgccacgcggcgtgacgccgagatgctccttgaaatatcggcggccgaacgtgatctgccgcaccaatgattcgccggaaggaatcatgttgtcagattccacccacatgccgccgaccgggatgaaccggccttcttcgatgcgccgcttcattcgtgcgaacaggtcgggatgttcttcttccagccatgcgtactgttgggcggaactcatcgcatacgtgaagtccgggtcttcgtccatcaaagccagcacgttggatacggtacgggccactttgcggcgtgtctcgcgcaccggccatagccatgcggagtcgatatgcgcgtggccgatggcaatgtggttgattgcgctggatgcagccggttcggcgagcacgccggcgagcgccgcacgggctgccggcacggtttccaagtcgcgttcatcgtagatgttcaaggagcgttgcagcgctttggcgagctgccagtagcgcgggtcgtcgtctttgagttcgcgaatcagggaagatacggtttccaagtccatgtcataggcgaacacgtcttcgttgaagatggtgatatccatgcgactcagtgtgtatgggaagtcacaggtgccggtggcctcttcgccgagttcggtgggtgagaacggggtggggccttcgacgaatgggttggcggcggcttcgatatagacggtgaagtcgccatgttcatcgagttctacagtgctgctgccgtccgcgtagacgagtggaatccagtggttgcgtgggttcgcggatttgatggcggtgccgtcggcacgatagacaagtccctcggattggaatccgggaccgcggtgatcgagccagccgaggtctaccatgagttcgacttttcgtcctttgaccgccgccatgtcgatgtggccgttcacctcgaaccatgtggtgccccatgtggtgccccagacgccgggaacgcggaaaggttcgaagggcacttggccgttgcgcactttggctagaaattcgctggagggcaccggttcgccgggattgtggaacgaacgcaaggtgcatgcggcgagtgtggtgtggatatgcggtttgacgcgctgctgcatgacgcggtcgcagcgctccaactgctgattgggtagaagaaacatggagagttcagctcctttgctgtgtctggtgggaagggaattcagcgcgtgatgcgcagggtggcgagctggaacgggccaaagtgcaacgtggcaccttcggcgttctgcctaccgtcttgcagcgcgactggaaggtcggtggccagattgtcgccttccagcacattggtctcatgcaccgaagcgcctgcgagcgccgggcagatgtgcagcgtggcatcggcctggccgccggccgcctcataggcacgtacgatcaggtcgccggaaccatcatcggccagcttcatccagtccagcaccacggtgccattgacggactcaatcgaggcgagcggcgtgatatcgggcacatcatggagtaccggtgcgttgagtgcgcaagcggcgtcaagcgcacggcccaccgtggcgttggccaccacggaccagtcgaactcatgcgcaccgatatcggtgcgcgggtcggggaaggtcggcgcggagagcaatgacagtcggaacatggtgcccgagtcacgaccttcggcggcgttcccggagatcggcgtggcatcggacccgtataccgatccgttgatgacggccgcggcgtaaccggcgtcgccgataagggcgaagcggttcgtgctgctctcatacttggcttcgtcggatgcggtgtttttgacgattgggcggcggaccagaccatactggcagtcgtatgttgcttggtcggccacgatacccagcggcagatcgactttgaggaagcgttcacgttcgtgccagtcaatgtcggcgtggaaatcgagcgtgtgtgaaccggggcgcagcgtgatggtggtggtgatgacggtgtcatcgtcggcggtgcgcacacggactcgtgccgtaccgttttcggtatcgaccgattcgattgatccggtcatggcattcgccatgagcagggattcgcgttcgatctcccaggcatcccaaacggcgggttcgtccctcaacagttcgtattggcccaatcgggtgccggccggaaccagttcacggccatgctcctcgtcaagcagcgacgagatcgtaccgtcggcctcgatggtgacggacagtacgccgttggccagcagtacacggccgttgtccagcgtctgagtcagcacggaaagcgcgtcggtcggttcgtggatgcggttggcacgccaagacgcgccgtcattgcggaactggctgatgcgggcttcggcgagcaagtcggcctgcgggttggccttgcgcagcacggcacacatgtcttgggcgatttcagcgagacgcttcaggtcacggcgatagtcctcgcgggcttcgcggtgcacccatgcgatggacgaccccggcagcacgtcatggaactggttaagcatcagggtcttccagatacggtccagttcttcgcgcggatagtcatagttcgggtcggccaacgtggcggccgcgcccaggtattcgaccgtgcgcaacagcgattcctcttggcggcagccgcgtttcatgtcctgttgcgaggtcaaggtgccacggtgcagttcgaggtacagctcgcccttccagacgggcatttccgggccggcgttctctgcaagctgctgatgcgccttgtcgaagaagtcgttcggctcttcgatgctcaccttggagacgccttcgaggttctcgtagcggtgcaggtgctccatcatgttgcgcgtggggccgccaccgccatcaccgaaaccgaagagcagaagcgagcggtcggcgagatccttgtcctggaagttcttctcggcgtagtcgagttcctgaaccttgcaccaagcagcataagtatccgccggcgggaagtgggtgaagatgcgcgagccgtcgatgccttcccacatgaacgagtggtgcgggaacttggtggtatcgttccacgagatcttctgcgtgaggaaccattcgtacccggcacggcgggcgatctgcggccatgcgccggtgtatccgaagctgtccggcagccatacgcccttgggctccacaccgagatgttccttgaaatatttgcggccatatgcaatctggcgaatcagcgattcgccggcgggcagcatgccatcggcttccacccacatgccgccgaccgggatgaaccgaccttcttcgatgcgctgtttcatgcgattgaagatgtccggatgatcctcttccagccaggcgtactgctgggcggagctcatcgcgtatttgaagtcggggtcggcgtccatcagcgccaatgcgttggatacggtgcgggccaccttgcggcgggtctcgcgcaccggccacagccatgcggagtcgatatgtgcgtggccgatggcgctgacgttcatggccgaggcgttggccggcttggccagtacgccggcgagtgctgcgcgcgcggcttccacggattcggggttgcgctcgtcgtaggcgttcagcgagcgctgcagcgctttggcgagttgccagtaacgcggcgactgtttgtcggcgaattccatcagggagctcaccacgtcgagatccacggagtagttctcgaaacgggcatcgaattcggtcagatcggcggacttgaatacgtacggctcgtccggcttgccggtggcatggtcgcccagttcggtctcaatgaacggaggcacgccgagcagcagcgggttgctggcggcttcgaggtacagggtgaagctgccgtcttcggcgaccggcacttgcgcgttgccctcggcatctatgaacggcacccaatagttgagcgggtgtacggctttgatggcggtgccgtcggcgcggtagacgaggccctcgatatggccgccgcaggagtgcgggtaccagccgaggtcgaggatgagctccagcggcttgcctttcgggtagccggccggcacggtaccggtcaggcggaaccagactgtgccccatgtggtgccccattcactgccgagcgtaaacggcttgaaatcgatgtcacctcgattgagcttcgcgaagaactcgtcagtgggcatcggctctccgggaatgtcaaaggactccaccgcgagctgtgcgatcgatgggtggatatgagggtccacgcgctggcgcactatgcgcttgcaccgctccagttgctgttcaggtttcaggaacatctgctgttcactccccttatctctgccgcttgtgcggccacatcattgtgctgcccgttcatgggaaacatatcgacatgcgccctcgcccgcaggagactaaagcgctttagtaacatattggagggaacgggatatgatgtcaaatcactatcgcaattcagcgtgttccgtcaggcatgtcatgctcggtgtcgatgacgatggtcaccggcccgtcattgaccagtccgacccgcatatgcgcgccgaaacgaccttccttcaccggcactcccccggagcgcaacgcctcgttgaacttgatccacatgagatcggcatgctcgggcttgccggccttgatgaagctcgggcgattgcccttgtgcacgtcggcgaacagcgtgaactgcgagatggagagaatctcgccgccgatgtcctgaatcgaacggttcatcttgccctgcgcatcctcgaacaccctgagattcagaatcttatgggccaaccaggcgatctgcttgtcgccgtcctcatcggtgacgcccaccagaatcatgaatcccgggccaatctgctgcggctcgaacgtgggatccagcgtgcccaattcattgaccacgtccacggacgcttcggatactcgttgcaatatgactttcatggttccctacagtacaacgtgtgcagtcaccagccggtaacgtacgcgaccgactggcgaccggcaatatctgcactgcagttcatcgtttaccgcttcattcgacgacgagaccgatagtcatcacgaacaccaccaagaaagtccggcgcgttgaggtcctcaaggtcagcacctccgcgcacggcggtcgcggcacaggcaacggcctcaaacgaggctttgattccctgtccatcggcatgaaaatcagtggcgcatcgcggtgagataccaaaatcgccagccgtctgttcggcgtcgatgttcgcgcccagaaacacaaactcccaatgatagcgttcacgctcataggtaatcatctgcttgatctgatgcaacgaatatcgacgactcgcgttctcatacccgtcagtaatgatgacaaacagcacatgttgagcacggtacgctgccgcagtatgtcgttgcgtcacgatcatgcggtcaatggccagcccaatcgcatccaacaacgcagtgctaccgcgcacccagtaatcccggctcgtcaaatcgttcacttcgcggatgtcgaggtgatcatgcaaggtttcgattcgatgatcgaacagtagggtcgttaccctgcactcgccggcaattgttcgctgcttggacagcatgctgttgaagccaccgatggtatctgattccagacctcccatcgatccgctcctgtcgacgacgaacaccagttccgtacggccgttattgccattgtcgttcttgcccatgatggatcctttcgctcattcgccagccggattgtcggcgatatcaatgagcttcgcatcatgggaccagtcctaggtagtgcccgaaggtttgcgcacttagggtcgtgcccgtccatgggacgatgatcagttcgcttcctgcaggttgtcatcgagccgggacatgtcgaggtagcggcgcgtgctccattcgttcgcggtgacgtacctgattctggcgcagatgagcatcaacgcgctgttgccgtccgggaaactgccgacgacgcgcgtgcgacgccggatctcccggttcagccgttcgatcatgttgttcgtgcggatcctcctgcggtgctccgtcgggaattccggcaaaaggtaggcggtcgtctccccgatgccctcgcgcaggcagccggccgccgccttgagcttcctggactccatctccgcggcgaccgtcccggccttggcgagggcggattcgcgggactccatggcgaatatcgccttcagggccgcggacgcccaatcccggtggttgggcggcaccttcgagagcacgttgcgcatgaagtgcaccatgcaccgctggtacttcgcccggggaagcatcgagttcaccgtggagacgagtcccgcgcaccggtcgccgaccacgaggcgcacgcccttcaaaccgcgttcgatcatgcttcgtatgaactgctcccagctggcagcgtcctccctcatgccctccgtcacgccgatgacctcgcggtggccctccgcgttgacgccgatggcgacgaggacgctgacgttctccacgcttccgccccaggagcgcttgtgccacacgccgtccatgaacacgtacgggtattcggattccaatggccgggtgcgccatcggtcgatgtcgtcatacacgcgcttgagcttgtcggaaagggtctgggatggcatcctgtcaccccacagcagtttgctgatgtcgtcgacctgacgggtgctcactcccgccaggtacatctccatcaacgcctcctcgacgctggactcccgcctgcggtagcgttcgatgaccgcggattcgaagaccgcgcccttgagtttcggcaccctgagctcgagcctgcccgcctttgccgtgagcgtgcgttcgtagtggccggccctgtacgccttgcgcccctccttgcgttcgtatctggcggccccggtgatctcgtcggcctcggcgtcgagcatggcgttgaggatctgggtcatcttctcggtgaccagccggtcgagtttggtctcgaacaggttctggtcgatctgtatgatgttgctgtcgggcatggctgcgcgtcctgctttccaattgcgattctttgtttggcgactgaaaatcgtacacaggacgcgggccatgcccgcttcaacatctcaacgaagaacaaaaccgaaagtgcgcaggaattcggacgttatccagtcctaggtcgcttggcaagcgacaatatgccgcgtatcggcagcaggtcaggagacgagcgtaccgctccgcatcattgcccaagcaacggctgatcgtatcggaacaacatctcgttaatagtgaatacatcaaacatctcatggacgatgaagaattccacgatcacatcgaatttcacgctgtgcgacagcgcatacccggcgcacgccaatatatcttgcgtctcgtcaatattcagccgtaaggcaatggccagtgccagaaccgttttcttgctgggcatatagccatcgccacagcgaattttagagaacagtttacgattgatattcgctcgtttatatacctccacgtcggaatatcctttggcgtcgataagcctcaagagaatgatgttaaatatatgcgcgaagacgtttgtcaatactgctgcttatttcgaaagcggttttgtcgaatacgcataggtatacgtcgagatcgtgtccggagtcggctgcgtcgcccaggaatcggcgaatctcgtcgagggccacatgaagggcctcggctttcggatatccatagataccgctggaaatcaaggggaaggcgatgctggcacacccctgccgtgccgcgagttccatcgaattgcgatagcacgaacgcagcagacgttcttcatcatgcttgccgtctcgccatatcgggcctgcggtatgaatcacatagcgtgatggcaaattgaatcccggagtgataaccgcctcaccggtatgaatgggagcaaaccgatcgcaggcagcagccatgcgcgagactcccgcggcgcggaatatcgcgccgcacactcccccacccatggcgagctgcgtgtttgccgcattgactatggcgtccaccttcatcttcgtaatatcctgtcggaccaattccagcggcatatatcctccctgattacggcgtagcataatagcctctacacatcgtgcaatcggcagccctgaactaagtctaaatcgtttcttccccgcaagttcgtccaactgacatatccgacacgagagaatagcgggaaaacaaggaatcaacggagcaataacagaaagccgctcagccttactttcgtaaagccaagcggcttgtttccgccgaagcggattggtggaggcgcggggaattgaaccccggtccgatgaccgagcccacagtcttctacgtgcgtagtctgctggccaagttggcgatttttctgcccccatcgatgtcgcagacaactgatggcgagcatatccgcagttaaagtcccgatgcagccctgaggctcaactgcatcagcaagtcttctaaacgacgctcagcatcctcccaaagacgaggaggagtgaacggagcggctgctcactggttaatcctgactaaaaatcaggcagcgagagcgaactcagtgcggttagatttagcacttattcttttgccggggtcatccacgagcggacccggcgttctcggcacgcttccctgcagcgaacaggtcaccgtcgaaaccgatcgcccccaatcttgagttatcaagctcccggcttttcggccggacttttcagcatacaccctatggcgctactcgcgcaaatcgccagcagcgaacatcgccccggaaccaacggaaccaacgaagccaacgaaatcgccgtcacttgatgatgggcttctgggatgaggaaacatcaatctgatgtttcccggcaaagccagccgtgccagcggtgatgttcttgtcgatttcctcgacttccgccaacttcagcttcagttgcgaggagtcgccccaaatgattacgcggtcaccgtcgttaagcgtggtagtcaccgaatcctgcgtctcagcggtgaccttggtaatggacttacgcatcgattccggcaacgcgcccagaatcgtcagcgcctccttcaccgaacggttcttgagactggcgtctatatccttgacctcgatcgccgggatgccatccacgttggcgttcttcaccgagttcaacacacgcgcctgggaatccaccgcggtcagggtatcgcctcttttcagcatggccgcgggccgttgcgccttgacttccacgctcatcgacttggggaactgtttggagaccttggcctcgctgacgccgggaatggacttgagttgctctgtgacctcatgggcggagaccaggaacaacgactttccagcctgcttatcggcgatgacatggatggtctgcgcactcacccattcgttggcaccggatacgccgatctcgctggtttccagacgaaacaccgacgagaaaagcagcagccacgttagccccgtcactacagccacactgacgaccgcaatcaacacgcgtaacgcaacaacgcgcacgtttgcacgcttgcgttctttggcgcgttcggtgaaattcaccactttcgggcgtgatgcgactcctagggagccggtggtctgatgcagcgtttcggcaacgtaatcctcgctgtgcaaccgtcgtgcatcgacgaaggcaccggcctggcccttggctaccgtcacatcatcgatgatctccggctcgtcgatctcatgcccggaagacacggaccggggagcgcgagacttcgacgagcgacccgtgtttccgcgtgaaccgatggtgcgcggcttgcgggagctcccagacgaacgacgtgagccgttgtcattgcccccggatctgaccgtgcgcccggacatcactcgcagctttcccgatgggcctcaagtgcggtgagcagcacctgatccatgtcggtgatgtcgcccgcgcccacggtgaagatcacgtcgccgtggtgggcgcgcatggccatcatcttggcggccaggcacatatcctcgaccggctgaatccacgtgcctgtggaagcatccttgagtcccgcagccgcgtccacgatggtggaggggctgatgtccgggaaatcggcctgcttttcacgggccgggaagatgccggtgataatgacgtcatcggctttggccaaggatttggcgaactggtgcgcgaagaacttggtgcgggagaacaggtgtggctggaagatcacacgaatggtcgaatcggggtaccggcgtcgggccgcatccagcagggccgcgatttcggtgggatggtgggcgtaatcgtccactacagtgacctgcttgaccgtgccgcgcacctggaagcggcgtgccgcaccgaggaatgtgccggccgccttggccgcgtctgcggggctcacgcccagcagcacggcagcgctgatggcggcggccgcattgcgcgcattgtgcacgccaggaaccttcagggcaacgctctgagacaccggctcccccgccgtcaccgcggccggcagatgcagggtgagctgttcgacgccgctgcctgcggtctcgctttccgaagcgatccagacatacgcggcaccgcccaaatcgggcagggattcacgcgcggtagtgccgtaggcaacggtatgggatttcacgtcggcgggcagggcctccagcacggcaagtccgtcggggtcgtcgatactgatgatcacgtgaccggtggcccggccggcgtgggcaacgaacgcggcacggtagtgggcttcgtcgccgtaatggtcgagatgatcggcttcacagttggtgataatggcgatggtcggatggtatttggcgaagctgccgtccgattcgtcggcttcggccaccaggatatcgcctttgcccgcgtgtccgccgtccagcgtggtgccgtccgggccttggataaagccgccgatggcgtagcttggatcggtaccggcgttcaccagaatgtgcgacagcatggagctggtggtggttttgccgtgcgctccggccacggtgacggctcgtttgccgttcatgagcagggcgaggatgtcactgcgatgcacaatgcgcttgcccgccgcgtgtgctgcgacgatttccggattgtccggtttgatggcgctggagtagaccacggtctcggcctgggcgacattttcggctcgctgcccgaattcaacggtgatgcccagcgtttcaagtcggtcggttttggcgctgtgtgcgcgatcggagccgtccaccgcgactccttcggcgtgcagcatttcggccagaacgctcataccggcaccgccgataccgatgaaatgggtggcgccgagatccgcaggacgggccgcagcatcgaatgaggcatacgtagggtcaagcactatgggctgatcttgagacaattcaaaactcctttagggattccagcaccctatattatgaccgtatctcgtgctgcagaacggaattggtcagtatcgcgcacggaatgatatctgaatactacttggatggttcggctaattgcagaacgtgccgggccatgatttcggcagcgtttctgatgccgtattcccatgccttgcggccgaattcggcaagtcgttcgtgatcggcgagcagatcgggcacatgctcatgcacccactgcggggtcaggtccttgtctgcgaccagaaggccgccgccggcgttcaccactggctcggcgttgaaacgctgctcgccgttgccgatgggcagcggcacgtaaatggccggcaggcccagtgcagccagctcggataccgatccggctccggcacggcaaatcaccaagtcggcacaggcaaaggccagatcgattcgttccagatattcggcggtatggtagtcaccttgtccggccgattcggggccgatgccggtaagcacgtccgcgccggccgaggccgtgaccagttcgcgtacttcgctgattttgcctcgcccggtcaagtggatgatttgtgcgtgggccaacaggtctgcggcggaggaggcgatggcgcggttcaggctttgcgctcccagcgatccgccagtgaccagcaccagcggacggttcggatcgacgccaagctgcgcggccgattcacggcgtacggcggcacggtcgtcaccgatgcgtttggtcagggaggcgatggccgggcgcaacggcagaccgacgcgctcgacgtcggctccggcacgcggtttgagaccggtgccctcgtacacggtaccgatgaaatcggcccaacgagcgcccagtttattggccatgccggcacgcgcattctgctcatggatggcaatcggaatgcccatcttgtgtgcggtggcgtagacgggggcggaagcatacccgccgaatccggccacgacatccgcatgccgcgtttcaagaatggagcgcaccttggcggtttctcgcttccattttgccgggaagcgcagcatgtacaggttagggcgacgcgggaacggcactttttcgatggtgtcgagctcgtagccggcctccggcaccaaatccttctccaaacccaccgcagtgccgatgacggtgacctgtgccgtggattcgatgtcgcgaatcgccccggcgaccgcgagcagcggattgacatgtccggcggtaccgccgccagcaagaacgatatgtggtgtgccttgattcatgattaccgagtctacttacgcgctctgacgcgactgttttatctgcggttgagagcgcataagtcccacaaccagtccggccgccgtcaagcacataatcatggatgagccacctgcggagacgaacggcataggcacgcccaataccgggaacacacccacgaccacgccgatgttgaccatggcctggcccacgatccaaatggtgacgcacatcagcaccatggcaacataacgatcggtgacctgcaatgcgatgacgatcatgcaccaggcgagaatcgcgaagaacagcaatacgatggcgcaaccgacgaatccggtctcctcgccgatgatcgcgaaaatgaaatcgttatgggcggccggcaggtaattccatttctcccgcgaattgccgatgcccaatcccagaaaacctccggaggcgatggcgtacttggcgtgaatggactggtagcatacgctctgcgcgtcagcggccgagcaatcgccatatgtggccagaatacgacgcaagcggttcgggctggaaaccgccaatgcaccgaccataaccaccgcgcccaatacgccgactcccatccatttgccggggaacccgacgatcagaaaggccacgcctccgatgaagaccagaatcatggccgtgccgaggtccctgccgcccatcaccagtgccacgcctatcgcatacagcgccaacggcgcggcatatgctttgattcccttcttgtggtacatcttgctgcaggcatgcaacgacgagggaagccatatgcacatcgcgaacttcatgaattcggccggctggatagtggtgaagccgaggtccagccaacctctgttgccgtagacgtcgtgacccaaaggagtaaaggtcagcgcctgcaacaggcaggcacccaccacaaagaacacgccggtccgtttccagaacgtcaccggcatcatcaatgccacgaagcccagcaccaagccgatcaggcaaaacgcgccctggttcagaagctgaaggaacggcgacttgcccagtgcggccatggtgaccgtggagctggagaacaccatgatcaggccgaagcatgtcagccccaccacggccatgcggaagccgtggtagcaccatagcgggttgagcaagcttcgccaacccgtgtagtcggcgatttcgagtgagggcttgtcaggggctctgtatgccttacgcttatgggtatcagtggaggccatgcacctcgctccacgtcttggctgcggcggcgaatcgattgcctcgatccgcataggacttgaactggtccatggaggcgcaggccggagccataagcacgatgtcgccggcggcggcatacgtgccgcaggcttcgacggcacggtccatgacggtatcgttgtcttcgggatcgatgatggtcaccgggatgtccggagcttggctggcaaacgcttcgatcatcggctgctggtctttgccgatgatgacggccgctttgatggtgtgtgcctggtccttgaccaggtcctcgaatcgactgcctttggccagacctccggcgatccagatcacagacttggccgggaagctggacagcgaggcgcgtgccgcatgaccgttggtggctttggaatcgtccacaaaacgaacagagccgccctcgactgcggcctcagccacggtttcgatgcgatggccgcccggcttgaacgaggtaagcgccttcagcgcggtatcgcgatcagcgccaagtcccagcaccaacgccaatgccgtcaatgcatcggccaccagatgcgggtacagtgagccgtccggctctgccagatgcgtgaaatcggtgatggcggccagtctgaccgactctcccactgtgccgccggccacgccgctcctgtccacgatccagccatcttcaatgccgatctggccggcctgaggggcctcgagcgtgaatcccaccttgcggcatccttcggcagtctgagcctcggccgccagttcgctgactttggcgtcctgcgcattgtagacgatggcgcgtttggcgttgtggaacaccttggatttgtcggcggcgtaattctcgcgcccgccatgccagtcgaggtgatcgtcggcgatattggtgatcgccgcgcagtcaagtgccagcgaatcggtgaagtgcaattggaaggagctcagttccacgcacagtacgtcgtgctgaggattggtggcgcaacgagacaggctcatgctcatgtctccggaggcgatattgccggcggtcggcgcgtcgagtccgcaggcggtgagcatttccgaggtcatctcggtggtggaggttttgccgttggtgccggtgatgccgatccatggagccggagtaccggtgcgctcgttattcacacgcagctgccatgcgaattccacctcgctcatcacggggatgccacggcgttgggcttccagcacgaacggggtgcgggggttgaacaccggggacgacatgacgtagtccacatggtcccagtccacgtcatcaaaggagtggagatcggcctcgggcttcctctcgtcgacgccaatcacgtgggcaccgcgttccctcaatacctccgccaacgaggtgccggacacccccagtccggcgatcaccactgtcttatccgctacttgcattgttcctcctgatataggaattccgtgggtgagcataatccacccagatttccgctagctgaacagcaggccggagcgggtgacccagtcgccgtagaaaatcgtcagggcgagcagcacgaagatgagttcgatcatccagaaccgcaccaccaccttggtttcggtccaacccttcagttcgaaatgatggtgaatcggcgccattttgaatacacgtttgtgggtcatcttgaagtacccgacctggatgacgtcgctcatggcttccatgacgtacagtccgcccagaaccaccgccaggaattcggtgtgcgtggcgatggacagggctgcgaacagaccgcccaaggccagggaaccggtatcacccatgaaaatcgatgcggggttcgagttgtaccacaggaagccgaagcaggcgacggccgcgcatacggcgatgacggtcagatcgagaggatcggacacggcataggaatatccgccatggctgccgcccttgatgtggtagctttcccagaatgcgatgacgccaaaaccagtgaaggcgatcatcgacgaacctgccgccagaccgtcaagtccatccgtcagattcactgcgttggtccatgcggtcatcaggaagttcacccagatgacgaacaggatgatggctacggcacggccggcgaagtcgaagttgaagaacggctgttcgatgaagctgatgcctgcctgcgcactggggaatcccgatttggtgggaatcagcagcgcaagtaccgcgtagatggtggcgaagatgaactggccaatgaacttgccgcccaccgataggccttcgttctgcttcttacgcaccttggcgaagtcgtcgataaagcccagcagacccatcgacagcatggcgaacagtacgagcgccgcggaccaggagggcacgtcgcccgaacgcaggtatcggtacagtgcggaggatgcccaaccgagcagaatcgcgaagttgatgaccacgccgcccaacgtgggggtgccgcgcttgaccagatgcgactgcggcccatcctggcggatgtactggccatagtgcagcttgtggaccagccgaatcagcagcggggtgccgactaaggtgacgatgagcgacaccagcattccaatgatcagagcaatcacgtgcagcttctctttcttgtcggtttcttggggtggttatcaggtcagttctttgcccagcgttcagccaaagcgctcaggcctgacgcgtgcgatcccttgagcagtaccacagcgtcgggatggttgcgagccaagtcgatgaccagctgttcggccgcatcgatgtcgtgtacgcaatccaccgacgcggattggctctgacgggcaccgtccgccagagcctgtgccagtgcatcgagatgttggtcttgggcggaaccgaccgcgatgatcgcgtcgatgcccaattcgtccgcatacgtgccgatcgaggtgtgcaatgccgtttcatcggcgccgagttccagcatggcacccagcagcgccacgcggaacggctccttgccgtcatttgagttccaggccttcaacccgttcaggccggctttcatggagtcgggattggcgttgaaggaatcatcgatcagcgtgaaggaagtcccctcgcgattcaccgtggacaatgccatgcgatgagggctgatggtgtgctgcgaggccagaatccgtgccaccgtttcgggtgccataccgtaacgcatcgccacggttgcggcggccaacgcgttcatcacattgtgacgtccaggaatgcccagatgcaccggcgtatggttgccgtccgcatcgaccaacgtgaattcagcatgatcggaccggtcggcagtgacatcaatggcccgcacctcgggctcctgcgacgatcccaagccgaaccacagcacgtcgccgttggccaggccggccatgggaaccacgtgttcgtcatcggcgttcagtaccgcggtgcctccgggaagcaatccctgcacgatctcgcttttcgcctgtgcgatgcgttcgcgggagccgaattctccaaggtgagcgacgccgaccttcaatacgattgccgtgttcggcggtgcgatacgggtcagtcgcgcgatttcgccgatatggctggcacccatctcagccacgaagaaccgggtgtgctcatcgacccgcaacgcagtgagcggcaggccgatctcattgttgaacgatcccaccggagccacggtcggacctacggtggcaagcagggaggagagcagatccttggtggtggtcttgcccaccgaaccggtcaatccgatgatgtcgaagtcgccgtccagctcgcggcggcgaacgatgttgtatcgggcgagttcgccaagggcgtcgaccgtgtctttcactacgatctgcggaaggccatcggacttcacctcatggtcgacgatggccaccgtggctccctgtccagcggttttcgccacaaagtcatgcccatcgacacgctcgcctcggatggccacaaacaccgatccggggccggcctgccgcgagtcgctgaccgtattggtggctcgagactcggaaccggcgtctccgatcaatcgaccatcgacggccttggcgatctcctccacgctcatcggaaccatggtgtttcaaactcctttacgattacgcttcgtcccgtatccacggacttaattgagattattggccacatgcagggcactgcgtatgttgtttttcctcacgccggcggccagcaccatggcgatggccaaggacatgtgcccgagtcggacgcggtcatacattgccggtgaatccgcagccatttcatccgattcgggtgtcgacgaggtcatggacatgtcatgttccgcaacgaatgcgtagcgtgtcttcaattcgttcaagcttgcgcttgcgttgacatcctccgtgcccagtacatccacgttcaccgattccaacgcatgctcggccaacgtgcggtcatccatggcgatgatcacggccgccacaccgtcttcggcgcacacggacagcgcgcgctgcatatcgaggatgcccagaggatagttcaggttcatggtacgtgtcatcgacgtggacccggatgcggtgattaccgccaccggattgcccagcatgtgcaggaattcggagagctgggacacgcctgcgtcgacggcctgctcatccgcaccggtcaccgcgaacaccgccatggcattggacggtccgccggccagaccgctggccagatcgccaagtacgcgatcgtcgaaatcgccgtagagcaacggtatatcggcattggcgatctgccctttggacgcgcgtggcagcaacgccgcataggcaccggcctgtgcggcatgcagtacatcgggttcctgctcatgcgtgcagatgaacagcgagccgggaatcacggtgtccacggcatcgctgagtgaggtaatggtgacattggtggcgaagggtggatcgacttcaaaaccgtaccgttcgaccagcattcccagggtcacccgctgggcgatggattcgctcactgcactcatgggctatcgcctttctcccctgatccttaccacgtgactggaatagcatttttgcgtggactggagacaggcacctcgtatttctgcataaggaactcacaaatctgtgcggaaacagggccggccgtcagaccgccgaacacaccattcggatccttcatcaccacggtgaccgcatagcgcgggttgtccgcgggaatcaccacggaataatcggagataatggacgagagcgtgccatccgagccctgcacctctgcggtaccggacttggcggccatgcggtaaccatcgaccttgacgaacttgttgtagccttccgccactgattccatcgcattcatcatgtccgatgcgaccttttcatccaccacgcgggtggcttcgcccttcttgctctcagtggtcttgccattggcatcggtggttgatttgatgatcgactgctgctgcttgacacccttgttcgcgatggtggccaccacgttgttgagctgcagggcgttgacggtgtagccctgaccaaacaggatggtgttgcgcgtacgcagatcccatgccgaggggttggtgagcagaccgctcgattcaccgggcaggttcagtccggtcggttgtccgatgccgaatttggtcaggtactcgtagcgttgctcatccggatagttctccccggccataatcatgccgacgttcgatgagttctgcagaatgccggcgagcgtccagcgctcagtgccatggtcgaatgagtccttgtaggtctggccctcctgtgtgatgtggtccgggaccgacaattgatcgctcatcttatgcagtcccatctgcagatagccggacatggagatgaccttgcccaccgaaccaggctcgaaggtttcggacacggcccgagacgggctcatcttcgccgcatcggtaccagcctgtacttcatcgctatcggccagtgcgagaatctccccgctctggacatcctgcaccacggcgatcgcccacgctgcaccatacttggattcggcctccttcaagacctttttgacataccattgcacatcacggtcaatggtcagggtgacatcgtcgccatttttggccgccaccgattcggtcatggtgccgggaatctcttcgccgccattaccacgctggtaggtttcatggccatcggttccggtaagcgtcttgttctcgacctgctcgatgccggcgacgccatcgccgttgtcgttcacgccgccaagcagcgcgcccatgagatcgccatccgcatacagtcgttcactgctcagctcaccccagacaataccgcccaggtgcaacgcctcgatgctgcgcttgacctgcggagtcacatctttcttcagaatcacatactgcccggtaccggacagatcagcgcccagttccatggcgttcatatccaggactttggccagcagtcggcccacggccgccgctccggtagcgcccacgggtttgccgtcaatttcgtggcagtaatcacgggtgttgtcattgcaagtaatcggctcgaactcctgtgcagcctccggattggcgacgatagtataacgctccacgctttgagcgagcacggagccgttggcgtcgaggatacgcccacgcttggcgctcaacgtcacggtcagggtgcggttagccgtggccgcttgtgcggtttgacggccgccgatgagctgggtggaggccagctgaatcacgcatgccgacgccaccaacgccaatgcggcgccgatggcgatgcatttgaacgcgaaggtcttgaccttggcgaactctacgatgcgacgaatggtgttcactgggttccgcctttgttggactggtatccgcttaagtcgatggacactgatccctgctgcgggaccatgcccatgtcgctggccttgtcgggcaggttcgcgaccaattgatcgagtttggcctgatcgtcttcgatatcttgggtaagtctgttgatgttggtttcgatctgtgccgcctcaaacgagttctgcaccatctgggtacgcagcatcagcgcgccgaacaaggtgccgacgaggaagatcactgcaatggccacgtgcaccagcggtgcgcttcttgttctggtccattcgatgacccgtccgacgacattgccctgctcgtttccacgcgggttggagaccacccgcagctcaggtcgggaggaggactgatgcttggtgtgcggtcggttcgaggctggagccgcgttcgatcgaatgctacgtgcagttgccatatgctgttatcccctccttgtacgaattcgtgccgtgtttttggctctgcccggagacgcggagccttgtatcttgacgtcattcaggccctgcgcggtttgcgtaaagcgtttcctccatcgtgacggaatctcacggctgacttccaccgcccgcaaccgcaccgaagccgatctcgggttggctgcgatttcatgttcgtcggccttgacggcacctcgcgtgagatccgtgaaaaacggttgggcatccggcggtatgacaggcaggccagccggaacatccactcgcagcccttgtgccatgaacgatttgacggttttgtcttcgagcgaatgataggactccaccaccagtcgtcccccgacatgcagtcggttcgcggcctgcggcaatgtggaggcgagcttgtccaattcgccgttgacttcaatgcgcaacgcctggaagacgcgtttggcgggattgcccgccgggcggtgggcttgcggcaccacttcatcgaccagacggttgagctgtgcggtggtggtaaacggctccttgtctcgacgcgccacgatggcgcgggcgatctgacgcgagaaacgctcttcaccgtattccttgaatatgcggaccagttccgccgcatcataggtggcaagaatccgttcggccgtcaacggctggctgacgtccatgcgcatatccagcggcgcatcatgcgaataggagaagccacgatcggtttcgtcgatctgcaggctggataatcccagatccatgaatacggcgtccacgcgttcgatgtcttggtccgccaacacctgatcgagctgatcgaaggcggcatgcaccggaatgaatcgatcggcgagcccctcccgttccatacgttcggtggccagccccagcgcttcactgtcacggtcaatgccgatgagccgagcctgaggcgcggccttgaggaaggcgatggaatggccggcaaggcccagggtgcaatccactgcgatggcgttctcatgttccagggcaggtgccatcaggttcacgcaatcgtcaagcaataccggcagatgaatattcgccacatcaaccatcagaattccacctccggcaacacatcgtcagcaatatcggaatatccctcttccttctcggcgaggtaggactcccacgtgtccttattccacagttcggcacgggtgccaacgccgatcaccacgacgtcggaacccagattggcgtaatcgcgcagcatctgcggcaccagcacgcggccctgcttgtccggctgctggtcgacggcaccggaaaggaacacacgcaggtattcgcgggcggctttgtttcccaccgacacacgctgaatctgcgaggcgatacgtcgaaattcgtcgaacggcagcaggtacacgcaccgttcctggcctcgggccatgaccaggccctgccccagctgggagcggaatttggccggaagcgccatacggcccttggcatcgatcttcggcgtatatgtgccgagaagcaatggcggcagaccagccatgagatcggccatagtggtggagccttgtgcgttggcatcagcgtcgcgaatcgtctgatcagcaaccatggctccacctccttcatcgttacgtgggatacacttcggccaactggctcaccactctaccccacgattccccatttctccccactcatgcacgatttgctcacccttttagggcaattaccgatggattgcgcgtgtcggccacgactgtcgcacgaatggacgctccgcacatctaatccacgtcgcgcaccccaccgaccgagcagcatggtgaattcacgctgaattcacctattccgggttgtccgcatcactgacgtagggggtgtgcggtaaatttgaatgccttaagtttttctgccccacggaaatggaacgaagagaacagcatgtcgagttacgcctcccagctgcatgaagagcagcaggccgtcgatcgcgcctatggacgattggatgatctgcgagccgaaatgtggcaacgcctggacaccgtacgcgccgccggctcccacggatcccccacgcaacgcagcgaacgagactcctttgccgcaatgtacgaaaaccgcctcacgcaattgcgcagcgttgaggatcggctggtgtttggccgcctcgatgccaagaacggcgaccgtcattacatcggccgcatcggcctgtcgagcccggaccatgagccgattctgaccgactggcgtgccgaagccgcacgtcctttctatgaggcgaccccttccaatcacggcgacatcgtgatgcgcaggcatatcaccttgagtttccgcgaagtcgtgggcgttgaggatgaggtgctcgacgtgcattcagaccaggtcggccaagcgtcttccgccggcacattgaccggcgagggtgcgctgctggcttcgttgagctcacgccgcaccggcaagatgaccgatatcgtggccaccattcaggccgagcaggaccgcatcatccgctccgacatgaatcgcgccgtggtggtgcagggcggccccggcaccggcaagacggccgtggcgctccatcgcgccgcctacctgctgtacacgcaccggcgcacgctggaacgttccggcgtgctggttgttggccccagctcggcgttcctgcactacatcgatcaggtgctaccctccttgggcgagaccggcgtggtctcacgcaccatcagcgatctgattcccggcatcaccgccacggcggtcgactccccttatgcagccaagctcaagggcgatcgacgcatgacctccgtagtggccaatgccatcgccgcacgcgtgcgtgttcccgctgctctgccgacagtaaccattagcggcattcaggtaccaatgctggccactgatatcgagcaggcgcaggcggacgcgaagcgcacccgacaacctcataacaaggcccgcgagacctttatccgttcgatgctgaccagcatgcagaaccgttatgccgaacagcttgattacacgccggatcaggcggagctgaaccgcgcgatgtcgctgctacgtatgaacgagcaggttcgcaagaccctgaacctgtgctggctgccgatgaccgccccatggctcatcgatcagctgttcgcccatcccgaacgtctgaagtctctggctggttggctgaccgacaacgacatcgcggcacttgcccgccccaaaggctccccgttgacccgctccgatattccgctgctcgacgaagcaatggatatgctgggccccgatcccaaggcggtggcccgccagtccgccgccgacgcacgtcgtgccgccgaagagcagtatgccaaagacactctggccgcgaccggtctgggtggaggcatcgtctccagtcagatgctgctcgaccagatgaacggggacgacgctgagctgaccgcgcagcgggccgcggccgatcgtgaatggacctacgggcacatcgtggtcgatgaagcgcaggaattgaccgccatggactggcgtatgttgatccgccgttgcccctcccgctcgttcaccatcgtgggcgatgtggcgcagacttcggcgctgggcggcacccgacgctggagcaaatcgatgaaccgcctgttcggcgaaagccactgggatttgaacgagttgaccatcaactaccgtaatccgcaggaagtttccgaacttgcctcacgatttgccgaggaggaaggcctctacatctccacggtcaatgcggtgcgcaccatccccgattcggtgtcccgcaatgtggtgcccgacatgtcgtccttgctggaaacgacggccgagcaggcggcgcagcttgccgaacaattcgtttcggcagacggcaccggccgcatcgccgtcatctgtccggataatctcatcgccccggtgcgcgatgccgtgcgccgcaaactggctgtcattcttgacccggccgaatacgcaaggctcatcgagcagcccgaatgggatgagcaaatcagcgtctgcggcactgaaacggtcaagggtctggagttcgatgccgtcgtggtggtcgagcccggtctcatcgaggatgacgcgccgagccgcctggtcgccgcctcggacctgtacgtggcaatgaccaggccgacccagaaactggttatagttcggacaaaagcggacgaaaagtccctgaacatctaaggtatgaagcatgcccaaagcactgttattggaaaacattcaccccgatgcggccaaatcgctgcgtgatcgcggtttcgaagtcgagaccatgaagggagccctgagcgaggacgaactcatcgatgcgctggatggcgtggacttggtgggcgtacgctccaagaccaacgtcacagcccgcgtgctggatgcgcgtcctacgctaagcgccatcggctgcttctgcatcggcaccaatcaggtcgatctggcacatgccggcaagcgtggcatcgccgtgttcaacgctccctactccaacacccgttccgtggtggaattggtgatctgcgacatcatctgcttgatgcgccgcattcccgcacacacgcatcacatcaagcatggcctgtgggacaagtccgcttccggctcgcatgaagtgcgcggcaagaccctcggcatcatcggctacggcaacatcggctcccagctgtcagtactggccgaggccctcggcatgcgcgtggtgttctacgacattgaggagaaactggcactgggcaacgcccaccgttgcgacaccctcaacgaactgctggaacagtccgatgccgtgaccctgcacgtggatggccgcaagtcgaacaccggcttcttcggcgaagaccaattcgcccacatgaagcaggacgcgattttcattaacctttcgcgcggtttcgtcgccgatctgggagctctgaagcagcacctcgattccggccatctgtctggcgcggcggtcgacgtgttccccgttgagccgaagaagagcggagatccgttcgagacttcactggccaatgaagacaatatgattctgactcctcatattggcggctccaccttggaagctcaggaatccatcggccatttcgtctctcagcgtcttgaggattactggttcaagggttctacctccttgtccgtgaacctaccgcagatcaacctcggtgagtgcaagggtgtgtgccgtatcgcccatctgcacgacaatcttcctggtgtgctggctcatgtcaatcatgtgctcggcgaggagaacatcaacgtttccttccagtcgctggcaaccgaaggcgaacttggctatgtggtcaccgacgtggctcaaaagcccagcgccgccacgcttgaagcactgcgcaacatcgaaggcaccattcgcatgcgtgtcatcagctgacgcagctcatcctcgattgatatgaaagagacccgtcgtcgacgggtctctttcataagtgctgggcttcatgattggctcgcaccatggtttgcgaatcactcgcatatcacggtgcatggcattcgcatattattcacgcaaaccatcaatggcgctttggaaatcctccagacctgcaaagttctggtacacactcgcgaatcgaaggtacgccaccacatccaagtcacgcaacggtttcaggatggctttgcccacttcatctgaggtgacttcggcaaggcctcgggagcgaagatcctcttcgactttctgtcccagcagcttcagatcctcttctctgaccggccgcccctgacaagctttgcgtacgccggaaatcactttgtctctactgaatggctccacgccacccgaacgtttagtgaccagcagcatactggtttccaccgtggtaaaacgcttgctgcatttcgggcatacgcgacgccgacggatggaatgaccgtcatcgctaatgcgcgtatcaatgactttggtgtcggggttctggcaaaaaggacaatgcatgctccccagaataacgtgtacgggcggaaaaaccatgccgctcgggtttcatttactcaaccggaacaataatgcgctgcccggcctgcaatgatccggactcaagattgttcaacgcaatcagctcatccaccgtttccgatacatcatgaccagcaggcgtgatagccgaagcatatgaccagagcgtatcccccggccgcacgatataaccggtcacctgcgtggcccccgtatccgattgggcccgctgaacggtaagcgcgccgaaaccacaccaggccagcgccaaggcgaccatcactgcgataatcttcccacgcacattccggcgggacgttccagcatgctgcatagctacacgtgcactacaggccggggccatcaccattgaaccagtcatcacgaccacctctctcgaacagatgttctatcgaacaactgttcttataatggcacaaacgttcgacacggtcaagtcaaaactcgaacagatgtttgatttcacacgaacaacacgttatgctggtgacataacgaaaggagccctgacgtgagcaccattcccttctcccccaagcagaagccggacgagtccaccctgaccgaccgccagcgcaaagtgttggacgccattcgcacgcatatcgacgaacaaggcttcgctccctctttccgggaaatcggaaatgccgccgggctcaaaagtccgtcttcggtcaagcatcagctacaagttttggaagacaagggcttcatccgcatgaacgcgaacaagggtcgagccatcgaggtggtggcaggatccgccccgaatgccgaaaagccctcccaagccagcgaagaggcaaccagcaccagtaatgtggcggagatataccaattccccgccgaagccattgccgaatcacacgatgtgccgctcgttggccgtattgccgccggcgtgccaattaccgccgaacagcatgtggacgacgtcatgcgtctgccggaacggctgaccggctccggcaccctgttcatgctggaagtccacggcgattccatggtggatgccgctatctgcgatggcgactatgtggtggtgcgcgaacagaattccgccgtcaacggagatatcgtcgccgctctgctggatgacgaggccacggtgaagaccttccgcaaggaaaacggccatgtctggctgatgccacacaaccccgcatactcgcccatcgacggcacacatgccacgattatgggcaaggtggtcaccgtgctgcgcaaattgtagcctgttcgccaccagctgatcagcgtgcaccgaatcgcgccggtcgtgctatagtcacgcacagcttacggaaccccggcctcgcgccggggtttcgtcgtattcagaccatatcgcaaatggtattgagaagcggtttcaactcgatagagcgaaggagtacatatggctcatacccatgcacccgcaccatccacatccataaaccctgccgcgcaccagcgtaggctgattgccacgttgaccgtaaccggttcggtcttcctcatcgaaatggtgtcggctgtcttaaccggctcattggccctgctggtggatgccggtcatatgctcaccgacatgtccgtgctggcggcatccacaatcaccgccatactgatgcgccgcaagcccagcaacactcgtacttggggctgggccaggcttgaggtgctcaccgctgccgcaggtgccgtggtgctgctcgtcgttggcatctatgcgttgatggaggccggcatgcgtctgttcggcggttccaaagcggaaatcgacgatatcggcttgctgctgttcgtgggcattctgggtcttgccgcaaatatcatctcgattttcatccttgcctcgcagcgcgaagacaacatgaatatgaaggccgcgttcctcgaggtgatgaatgacgcacttggctcggtggccgtggtggcctctgccctggtaatgatctccaccggatggaatggcttcgacgccgtggccggtgccgtcatcgcactgatgatgattccgcgcgccatcaagttgctgcacaacgcggtcaaggtgctgctggaggaaacaccggatggacttgacctcgataaggtacgcgaacatctggaagacgtgccgcatgtgcttgccgtgcatgacctccacgccagcacggtgtccaccggcatgccgattctgatggcccacgtggtagttgacaaagacctcaccatggaagatgccgccacaatcctcacccaactgcaggattgcctgcgcgagcacttcccggtctcggtcccccacaccaccttccagctcgagcccgagggctatagctccccctcctccaacgaactccacgaataaaaaatgctcccaacgggagcattcagcagggtataaaaaatcgctgtatgtgtgcgattttcgtgccgcacaagttgaaggcctacaaaggtaggtcgagtcttgtgcggtgcgaaaggcgctccgtacagcgattttttatcagaagccgaactgggcggcggtttccttcagcgtctcggcagagcgcttcagagcggcgagctccttgtcggagaccggggtgttgatggtgttgttgacgccctgacggttgaggagggtcggcacggacatgcagatgtcggagatgccgtggaagtccttgagcatggagctcacgggcaggatgcggttggtgtcgtgcaggacggcttcgatgatgtcgacgccggacatgccgatggcgtagttggtggcacccttaccgttgatgatcttgtaagcggcgttcttgacttcctggtggatctcctcgcgcttgtcggcgtcgagcggatcgtggccgggcagcggggtccagtcgcacatggggacgccaccgatggtggcggactcccacagcgggacttcggagtcaccgtgctcaccggcgatgtaagcgtgcacgttcttgacgttgacgccggtctgctgggcaatcaggaagcgcagacgagcggagtccaggttggtgccggaaccgaagatctggttctcgggcagaccggtgagcttctgagccacgtgggtagcgatgtcgaccgggttggtgatgagcatgtagatggcgttcggagccaccttgaccaggttcggcatgatggccttgaggatgttgacggtagcgccaacgagctcaagacgagactgacccggcttctgacgcggaccagcggtgatgacgaccatgtcggcgtcgcggcagatctcaggatcgtcggaaccgtcgatggacacggtcgggtagaagctggagccatgctgcatgtcgagcacttcggcttccacgcgctccttggcgatgtcttcaagcacgatctcgcgagcgatgccacgctgggcagcggcgaaggcgagggtggagccaacggcaccggcaccaataacagcaagcttcgtgggcttaacggtagtttccgccatgatggatgaacctctcttcaaaggcggtctgctgatgaatggcaggccttgtaactaacgtcttcactctataaacccgctaagacgttttgctaccagcacaccaccctgtttgataaccgtatggtaatgttttcaacggttgttagcgctcacgaatatactgtgatgtttatcacgttagtcaatggactgttcgaccacctgagcggcaagatgggcgtcaacgtccgcttcaagctgtatgccatcatcgcggtactccaccttgtctaccttgccgtattcgcgtacacgagagatcagggagccagcggtatacggcagcagagcgttgacatgcacatgcgggaccggcagcagactttcgaccgcggtacgcagctcgtccaatccctcaccggtataggcggagacgatgaacgcatctggctgcagcgcggcgagtcgttcacgagtcgcctcgtccgcctgatcggccttgttgaatacgagaatacgcggaatcgaggccgtgccttcgatgtccgccaacacatcattgaccgcgtcgacctgagagaacgggtcagggtgggagccatcgaccacatgcaggatcacgtcggcctcggccacctcttccagggtggatttgaacgcctcgaccagctgggtgggcaggcggcgcacgaagccgaccgtgtccacgtaggcgtaagtgcgtccgtcgcgggttttggcgcggcgcacggccgtgtccaatgtggcgaacagcgcgttttccaccagttcggccgaaccggtcagacggttggtcaacgaggatttgccggcgttcgtgtagccgaccacggccactgtgggcaggccgaagcgacggcgtgaaccgcgcttgacctcacgtgccggggccatctcacgaatctgacggcgcagtctggcgatacgcgtgcgaattacacgacggtccatttcgattttggtctcgcccgggcctcgcgatccgatgcccgcatccgcgccggccgcgcgaccgccggcctgacgggacagcgaaccgccccaaccacgcagtcggggcagcatgtattcgagctgcgccaactccacctgcgccttaccttcacgcgaggtggcgtgctgggcgaagatgtccagaatcaccgcggtgcgatccaccaccttgactttggcggcgtcctccaatgcacggcgctgtgacggcggcaggtcgtcgtccacgataatcgtatcggcttcctcacgcgccacgatgccggcaatctccttggctttgccggaaccaacgtacgtggctgcatccggcttggagcgatgctgcagcaaaccatcgcataccaccgcaccggcggtttcggcgagcgccgccaactctctcaatgattcctcggccttggcttgcgtggtgacggcggacgaccagacgccgacgagcaccacacgttccagacgcaccttgcggtattcgacttcggtgacgtcctgcagctcgccgagaccggcgacatgcttgagctcgttgcgggcctcgcgctcctcccattcctggttggcgtcctcatgccagccggtcgcgcgctggctgtcgtcgagcaacacttcggactgctcggccagcacaccttcaggggtaacgtcgttgttgccgcggttgatgtcggtgtactgggtgttgtcggtcaagtgcgcctcgtttggttggaatggttcacgattcttctatggtcctttattatcatcacatgaggtgacatgctggcatagatcggcacgtaccggcataggccggctgatacaggtcggcatacgagagcggcgaatcccgcagaaatggagcgaccatggcagaacagtatttctctgcggaacccgcatcgaaggatgtgcgccgcacattgaacgtaacgttgcgcggccatgaggcgaccgctcaggtgtcgaacggcgtgttctccggctcgcgcgtggacctcggtacgtcggtattgctgaagcatgcgcccgagccgccgcttaccggcgattttctggatttgggctgcggctggggccctatcgccctgacattggcgtttgagtcgcccgaagcgaacgtgtgggcggtggatgtcaacgagcgcgcgctggacctgacccatgccaacgcacaggcgaacggccacacgaacattcatacggctcaggtggacgagtccagcactcccctgcctgccgagaaccagccggcgttctgcgagacggtgccgagcgacctcacgtttgatgtgatttggtcgaacccaccgatccgagtcggcaaggaagcgctgcatacattgcttatggcttggctgccgaagctcaaggtgggcggtgccgcctatctcgtagtgcagaagaatctcggttccgattcgctgatcccctggctggacgatgcgctcggcgaggggttcactgcgagcaaatacgcgagctccaagggcttccgtatcattgaagttcgtcatgaaatatgagtatcccgcagaacttcccgtatctgccgcgcgtgatgagatagccagcgcggtcaaacgttcccaagtcgttattgtgtccggccagaccggttcgggcaaaaccacacagctgccgaaaatcctgcttgagcttggccgtggcacgcacggcaagcagatcgtgcacacccagcctcgccgtatcgccgcacgcacggtggccgaacgtatcgcctcggagatgggcgtgaagctcggtgacgaggtcggctatcaggtgcgtttcaccgacgaaagctcgcccagcacacgattgagggtcgtgaccgacggtattctgctcgcccagatccagcgcgatccgaaactcacccgatacgatacgatcatcatcgacgaggcgcatgagcgcagtcttaacatcgactttctgctcggctatctgacggcactgctgcctcagcgccgcgatctgaagctcatcattacctccgcgaccatcgattcggtcaagttccaggagcatttcgagcacgccttgcatgagaaggtgccggtaatcgaggtttccggccgcaccttccccgtgcaggtggtctacgagccgcttggcaccgcgcccgcgttgatgcgcgaagtgccgggattcgcggtgggcgcccgccccggcgacgccgattacgacgagctggccagcgccatcgcggaatccgattccgaccggccccgcggccggtccggtgcctcctatgccgatgacggcatcaccgatatgcctaccgccgtggctcgagcctgcgccgagctggtgattcactcctcccacgagcgcggtccccgcgatattctggtcttcgcctccggcgagcgcgacatccacgagttcgaggccgcactgcggcatcattacggcccgcgcgccgacgacatgcgccggccggatgccatcgagatcatgccgctgttcgcgcgactgtccgccgccgaccagcataaggtgtttgaatcgcaccttcaccagcgcatcgtcattgccaccaatgtggctgagacctcgctgaccgtgcccggtatccggtatgtggtggaccccggttccgcccgtatctcccggtattcgaagaccgcaaaggttcagcgtctgccgatcgagccgatcagccaggccagtgccgaccagaggtccggccgatgcggccgcgtggccgacggtatcgcgatccgcctgtattcgcgtgaggattacgagacccgaccgcgcttcaccgagccggaaatcctgcgtacctcgctgggtgccgtggtactccacatgctgtcggtgggtgtggcccgcacggccgaggacgtcacgaacttcgggttcatcgatccgccggatatgaaggccgtgtcggacggtttcaatgagctcaccgagctcaaggccatcggccgcaagcgcggcgaggtgacgctcacccataccggccgtcagctggcgcgcatccccatcgacgtgcgtctgggacgtatggttatcgaggccgcgaaaaccggttcgccgaatcttctggcccaggtgctcgtggtcgtggcgttcctgagcttgcaggacccacgtgaacgcccggacgacaagcgtgaggatgccgaccgcatccacaaccggtatgcggatgagacttccgacttcctgacggccctgaatatctgggaccgcgtgttccaggcggacggcgacccgagcaacaacgcgctgcgccgtatctgcaaaaccgagtatttcagctggctgaggatgcgccagtggaaagatctcgtctcccagctacgccagatgtgcaaggagctgaagttcaaggtcggcgacccgctgcccgcctcccgcccaggcttggagatccgccagctgccgttgaaccagcaggccgcgcattcgctgtgctgcgcgtgggatgcggacggcatccacaagtcgatgctcgccggattgctgtcgatgatgggcatgcaggtggtgcgcgagcccaaggcctccgatttcgcggggctgaccggttcggcgcgcgcccgtgcgatgaaacgcgcccagaagcagtcgaagaacgattatcagggcgcacgcggcacccgtttcgccctgttccccgcttccgccgtggccaagaagaccccgtcatgggtgatgagcaccgaactggtggaaacctctcgcctgtgggcccgctattcggcggccatcgaccccgcgtgggccgaaccgttggccggccaattgacccgcaccacgtatgcggagccgcactggtcgggttcgcgtggctcggctgtggccaccgcgcgcgtgctgctgtatggtctgccgatcgtacaggaccgtgccgtgcagtggggacgcatcaatccacttgaggcgcgcgacttcctgattcgccagggtctggtcgagggcgatattcagcagcgtttcagttacgacgacttcgtgggcaaaaaccgcgacattctcgaggatgccgccgatgatgcgagccgcacccgccagctggcggataccgtgtccgacgaggatctgttcgacttctacaacgcggtcattcccaacgatgtgaccagcgtggccgatctggcgaaatggtggaagtccgagcatgaccgtcagccgaatctgcttgatttcgacccggccaaggtggagcgtctggcatccagcgattcggtgagtctggacgattaccccgaccattggcatacgaccggatcggacggccaacccatcgacctgcgtctgagctacgtgtacgatccggccgacccggccgacggcgtcaccgtgcatgtgccgttgaaggcgctctcgcgtatcacgcccgaccagttcacatggaatgtgccgggtctgttggatgagctgatcctgtcgatgatcaaggcgctacccaagcagctgcgcgtccagttcgtgccagccccggatgccgcgcgtgcgattcgtgactggatcgacgagcattacccggatctgccgggctcgggctcgcagcagaagccgaatctgccgccggtggatgaggatggcacgaccgttggctggcccgatctggcacatgtgttcaccaaggcggccatcgccaccaagggtgcgcagattcatcccgaagtgttggggccggaactggtcgagcgtctttccccgtatctcagggtcacgttctcggtggagcagcaactgccggccggcaagcaccctcgtggacgccggcatgcgcgcggccccatcaaggtgctgggtgtgtccaaggatctgaaggcgctgcaacgcaagttcgccgcgcaggcggaggcgtcggcccgtcaaatggtcaagaagcaggccgatcaggctggagaacagggcaagctggtcagtcaggcgaacctgttgcataaggcgggtgccaccaccgagtcccgggccacgatgctctggcgtggcgcattggatgcgctgcggttgccggccgaacgcatttcgtcgcgctggctgggtaccgaggcgttgatgctggcttctgctccgtacaagtccaccaaggatctggtcgaagacctgcagctggccacggtcaaacggctgatgccgaatgtcgacaggctctcggacgatgaggcgttggccaatgcggtgctcgatgtgcgcgaagtgtacgaggacaccgtctatcaggtggcgcatgacgtgatcgccgtgctcaaggcttatgccgaagtcgacaaggccactggcggcaaggctgatctgccgatgctttcggtgttgcagtcgattcgcgaccatatcgccacgctcgtctaccccggattcatcgggcgcactcccccggatgcgctgaagtcgttgagccgatatttgagagccgatctgagccgactcaataaggcgaaaaccgataagaaccgtgacgtcaagtgggcttggcaggccgacgaggcccgtcaggtggtagataaggcgttggcccgtgccaaggcggagccggccggcccgaagcatgaggcattgatgaagcaggccgaacaggcccgttggatgcttgaagagttctacgtgtccctatgggcgcaggagcttggcaccaaggggccggcttcgctcaaccgtatcaagaaagcgctggcgtgaccggacggcaaacaagtcgccaggccacgcgccagcgcacgcacaagccgtcatcacagcgtgggccagtgcgcggacacctcggcaatcggaaaaggaaacgcaatcgtaggcacggtccgatcaatgctctgaagcgttcctggcgtaaggcgaactggccgacccgcatcaagatggggctgattcccacggtggcggtggtcgttgtcgtagcgctggtggccgagctggttcgtttcacaaactggcgggcacaggttcgcgcagccgaggcggcacagctggaactgacgcgaacatacgatttcaatccgggcaatattatttcggatggtcagttcttcaacggttcggcgatgagtcaggccgaagtccaatcgtttttggacacacaaggcggctcgctggccgcgatgaccttcgacacatcgaacgagtcaggcgaaggcctgtgcacggactatacaggcaccaaaggcgagtcggcggcggcaatcatcgaccagtcggcccgcgcctgcaaggtgagccagaaagtactgctcaccgtgatgcagaaggagcagcatctggtcactgccgtcgatcccagcgactatcagcttatggcggcgatggggttgaactgtccggataccgccgactgcgatcccacctatgccggattctttcggcaggtgtatggcgcggccaagcggtaccgttactatctcgagcacgaggaacagtacgggtatacggcgcacaatctcaactacatccaatatcatccgaacgcggcatgcggcggcgcacaagtgtatatcgagaacaaggcgaccgccctgctctacatctatacgccctaccagccgaacatcgccgcactggccgccggcaacggtaccggcgattcctgctccagttatggcaaccgcaacttcgcgcttatctacaccagctggttcggttcgccgcgaagttgataacggcagccgaccgatcttgtccgattggactcggccaacactgtcagcgttcgacgtatggacgcagcagggtcgtgatgccaaccgccagcagcgaggcgaaagccagcagacacaggcagacggcctacacgcagtagatcggtcgaatgtgggtcaatggttccacgccatgacctttgtcggccagcttgccgccgtacaggttgctccacaggcaggcgcagccgtaaatcaccaagccgatgctgatatagcgttcgggcacgccgatttcgtcgcgcatgatcggcgaaagatacgtgtagaagacgtaggaggcggctgcgccgaagaccacatccgccacaccgagctggatgcggcggtcgaagaacaggcggaattgcctcaggaaaccgatcttcgccggatgcgagctacgtggcagagacactgccatcgatgccatcagcacggcggtgagcaccgaaaccaaggcaaaggtgacacgccaaccaaaggtatcggccacccaagtgccggccggtgcgcgcggtgttcgcaggtgcgttcgtcatgggtgctctcttgagtactctcttgagtgctctcgctcgtactacaagctgattcgtcggttacgtcaatcgttttttcgtatcaactcagcgataacacttttcccgcctctgcccgctacccaccacaacgacacgccatagaaaaccccgccgatgaccaatcatcgacggggttcggcacatgtgcaacgcttgcgattacagcttcggcagatacttcttcagctcgtaaggcgtgacctgctggttgtactcctcccattcctggtgcttgttgtccaggaagtagccgaaggcgtgttcgccgagcacgtcggccacgaaatcggatttctccatgatcttcagcgcctcgtccagcgagcgcggcagcggctgaatgcccatagcctgacgttcgccgtcggtgagctcccacacgtcatcactggtgggttcgcccagctgcatctgcttatcgatgccgtcgagaccggcggccagcagcaccgagtaggcaaggtatgggttggccaccgggtcgagcgcacggaactccatgcgcgcggagttgcccttgcccggcttgtactgcgggatacgcagcagcgcggaacggttgttgtggccccagcagatgtagcttggtgcctcgttaccgccccacaggcgcttgtacgagttgacgtactggtcggtgaccgcgcagatttcggccgcatggtacaggatgccggcggcgaactggcgggcggtcagggacatgttgaactcctgaccggcctcgtagaaggcgttggaatcgccttcgaacaggctcaggtgcgtgtgcatgccggaaccgggcgcgtcggccaggggcttgggcatgaagctggcgtgaatgccacgctccaaggaaatctccttgaccaccgtacggaatgtcatgatgttgtcggccatggtgagcgcgtccgcgtatcgcagatcgatctcgttctggcctggccccgcctcatggtgcgagtattccaccgagatgcccatttgctcgagcatgttcacggtggcgcggcggaagtccatgcctgggctgcgcggcacgtggtcgaagtagccgccctcgtcgatcggggtcggggccttggaccagtcgtcctggctttcgaacaggtagaactcgatttccggatgcacgtagaacgtgaagcccttgtccttggctttggcgagcgtgcgcttcaacacgtgacgtggatcgccgagcgaaggctcgccgtccggggtcagaatgtcgcagaacatgcgggcggtaccttgcgggccaccgcgccacggcaggatctggaacgtcgagggatcgggttgaacgatcatatcgtcttcggacacgcgggtcatgccctcgatggcggaaccgtcgaagccgagaccctcctcaaacgcggcttccagttcggccggagcaatcgccacggacttcagtgttcccaacacgtccgtgaaccacagacgaataaagcgcacgtcgcgttcttcgaccgtgcgcagcgcaaactcctgctgtttatccatagtcgcctatcgttccataaccgtgttacgaagggcgttaacatctcactgttcgtcacctgcgagtcgcgagatttcatcaacatgccccggtccgcatgtcaggcatggttcaggcccatgccggcacggcactatggtagtgactatgagcgaagatcatctcaccccatccgccaatccgcccgtcgacgtgaccagctggacacaggccaccgacccgcgcgaccgttcgcgcgccggcatcgccactcgtaccaaggcgccgctggacgcacatgccatctggaaggtcaaggagggccggcgtgaggcgatcagccttttggaggagcagtccgcgattcgcgtaccggatctgattccgctgcgttacaagcgtatgagcgccagccccttcaccttctaccggggcaccgtgctcatcatgaccaatgacctggcttccacgccagtcactggcattccggtgcagtgcgtgggcgacgcgcatatcggcaatttcggcattttccgctccccttccgcccgtctggtgttcgatatcaatgatttcgacgaaaccgctatcggcccgtgggaatgggatctgaaacgtctcgccgcctcggtggagatctgcggacgcgccaacaaaatcaaggagaaggaccgtcgcgccgccgtggtccagtgcgtacacacgtaccgcacacgcatgaagtggttctccgaaatggattaccttgacgcgtggtacgagcacctggacgtggaggagacgctcgaccgcttcgagaccaccggttccaaacgcagccgtgtgctgcgcgaggcggccatgaaggcgctgctgaaggataacgacgcggcggcggccaaactgtgccgttatgagagcggcaagctcaggttcaaatccaatccgcccgagctggtgccgatcaatcagctggatgattacgccgacttggatgcgttgcaggcacgtatagacacgctgttcgagagctaccggcattccctgtacgacgatcgccgttgggtgttcgatcatttgcgctatcaggatgcggcccgcaaggtggtgggcgtgggctcggtgggccagcgcgcgtggacgtcggtgtggatcgcgcgtgatatcgacgatccgatgatgattcagatgaaggaggccacgtattccgtgctcgagcattactgcggcgcgtcgccgtacgccacgcacggtgagcgcgtggttcaggggcagaagctgattcagaatacggccgatgtgctgttgggttggtcgagctttatggccgaggatggccgaccgcgcgactattacgtgcgccagttgtggaatggcaaggggtcgattgatatcgacaatctcaacgcttcgggattgagcgatctgtcacgcatgtgcgcatggtcgttggcgcacgcccacgcccgcaccggcgattcgattgcgatcgccaattacatgggtggcaccgacgaattcgatcaggccatcgcctcattcgccgtcagctacgccgaacagaatgatgaagactacgccgtcttcaaaaagctcctcaaatccggcgacctcccttgctgagccgttaagcggacagcccaatgggctgtccgtaggaggggtctgagtgaagcgatagctgagcgaaggtagattaacagtctcgctaaggcgagtcctttgcctacttcgctacttcaagcgcttcctggagcgtgaacgcacgtgcatagagggacttgccgaggatggcagaatcaacaccaatttcagccagttccttgatggcgcgcaaatcgtccagcttggagataccaccggaagccgtgaccttggcgtcggtgcgttcagcgacttcactcagcaattgaatgttcgggccggacatcatgccgtccttagccacgtcggttaccacgtaacgcgagcagcccacggagtcaaggaacttcatggtctcaaacaggtcgccgccttcgcgcgtccagccgcgcgccgccagtgtgtgaccgcgcacatccagaccaacagccacgcggtcgccgtacttcttgatgaccgaggcggtccaatccggattctccaaagcggcggtgccgatgttcactcgggcggcaccggcctcaagggccgcgtccaacgaagcgtcatcgcgcacgccgccggacagttcgatgttcacgcggtcgccgagctcatgaacgatttctcgcagctgatcgcgattgttgcccgtaccgaaagcggcatcaaggtcgaccaggtgaatccattcggcaccggcctcaacccaagtacgggcggcctcgaacggcgaaccgtaatcggtttcggaaccggattcgccttggcgcaggcgcacggccttgccatcgcgtacatcgacggcgggcagcagagtcaacgacataagaagagcctttcttcagttacttatacacaatttgagctccctcgtcagagggagcttcatgcttttttacagcgtggcgatccagttcttgaggagctgggagccagcgtccccggacttttccgggtggaattgcgtggcggacagcgggccgtgttcgtaggcggccacaaagcgcgatcggccgtacgagcaccagctcacgcgttcgggcgaatcgctcagatcgatgtcgaagcgggacgtatccgccggcttcacttccatcgcggcgtaggagtgcacgaagtagaaccgttcgttctccacgccgttgagcagcaccgaatcgggggcggcctcgatcgtgtcccatcccatgtgaggcaccacgtcggcgtccagcaggttcaccgaaccgccgatcagtccgatgcctgcggcatgggcaccgtgctccagaccgtgttcgaacatgatctgctcgcccacgcacacgccgagcaccgggcggccagcgcggatgcgatcatagatcacacggtcgccgtcgaccttcttcagtccttccatacatgcggcgaacgcacccacgcccggcacgactaggccgtcggcctccaacgactgccggtagtcggaggtgagggtggtgtcgacgccaagattggcgagcgcacgcaccatggaacgtacattgccgaaaccgtaatcgaaaacaaccgctgtggtcatctgctctcctatcccctactggtttggttggcgtctattcgatgcgggagccgcgcccgccacgtccgcgcctagtgtggttggcgagaatctgcatcgcctgatcatggtcgagtccagcggaatccaccacttcgaacccttgggtcttgagttggttcagggttacgatgccgagcatcaggtcctcgacgaagcgcggtgtggaggtgaacagcacgggcggcgcgaaactctggccggcctctccctgcacgtacatggccacttcgagcttgtcggcacgattgactgcaagaatcacggccatgccggataccacggtggtcaggtccttggctgcggcttccgggccgtcgccgtccagattcttcagcaccgcgacggccccctgattggcaccgatgcatgcggcggagatgtccgacagctggcagaacgcggccaacagttcggcggaggcaagacgggtaacgatcagcgccaccttcgccttgttacccaacagtccagcgagttcgttgtcgaagccgagcgaggggtcgaccacatcggccatggcctcgttcaccgcatccgcaacggacccggtgacgtcgtcggtcataggccggccggaatcagcggaagccttatcagccgtatcatcattcgcgtcggaatcggacttcgctgaagcagcgtccgctgttttatcggcatcactggtatcactggcatcgccggataccgaatcgtccgcgaattctttctcgaatccggcgagcgcagcctcaagctcctcgtcggagaagtgcgattcgtccggatcgaacttgtcgtcggtcatcacagggctcccttggtgctgggcacgccgtctacacgcgggtcgatttccacggcgaagcgcagcgcacgggccagcgccttgaattcggcttcagcgatgtggtgcgggtcgcggccggcgagcacctgcatgtgcagacagatgccggcgtggaaggcgatggattccatgacgtggcggaccagcgagccggtaaaatggccgccgatcatgcagaattcgtagccttcgggctcgccgctgcacacgcagtacgggcggccggaaatgtcgaccacggccttggccagcgcctcgtcgagcggcacggtggcgtcggcgaagcggcggatgcctttcttgtcgccgagagcctgcttcagagcttcaccgaacacgatggccgtatcttccacagtgtggtgcacgtcgatgtcggtgtcgccgtgggcgtggatggtcaggtcgatcagcgaatgcttgccgagcgcggtcatcatatggttgtagaacggcacggatgtatcgatatcggttttgccggtgccgtcgaggttcagttcgaggtcgatgtgtgattcgctggtttcgcggacgatgtgcgcggttcttgccatcatgtctcctgtgtgattcgtcatattggattgcggcgggactcgaatcgcttcgggtctcgccgcaatcggaaagaaacgtcccttatgctgcttccactatacgaagcacttcaacaagggcgttacggaaggtttccatctcctcgtcggtgcccatgcacacgcgcagccaaccgtccggtccgaccacgcggatgagtacgccgcgcttcaggagctcgtcgaagatggcttcacgcttgtcgaagtgcccgccgaacagcaggaagttcgagccggattcggccacttcaagcggctggtccttgtaggtctgttccttgagccatgcggcggtggcctcgcgggtttcgcgcaggtgctcgacacggctcagctgctcgtcggtgtgttcgaaggcggccagtgcggcggcctgagtcacggcggacaggtggtacggcatacgtacgatacgcacgcagtcgatgatgcccttggacgcggccaggtagccgactcgcgcaccggcgaaggcgaaggccttgctcatggtgcggctgacggccaagttcgggtggtccttgatcaggctcacggcgctcggggtgccgggcttgcggaattccacgtacgcttcgtcgatgacgagaatcgggtgcacgccctcgcccgcgccgaccacttcagcggtttcgcaggcggcgagaatacgttcgatatcctccatcggcaacggggtgccggtcgggttgtttgggctagtgagcagcaccatcgagggcttgacctcggcgatggcctcaagcaccttgtcgacgttcagcgtgaagtcggcgttgcggtgggcgagcttccaaccggtgaaggtgtcgcgggcgtactccgggtacatggagtacgtcgggtcggcaccgagtgcggtgcggcccgggccaccgaaagcctggaacagctggagcatgatctcgttggagccgttggcaccccacagctcgtccacgtccagacgggtaccggattcgcgggccaggtaatcggagaatgcctgacgcaattcgatgtgctcacggtccgggtatcggttgagtgtgggggcgatttcacgcacacgcttggcgatggtgtcgcatacggccgggtccggcgcatacgggttctcgttgacgttcaggcacaccggcacgtccagctggggagcgccgtacggctcctcaccgatcaggtcgttgcgcagcggcaggtttgcgggaatcgagctcatcgcagaccggcttccttctcctgctcgcgcagggtggccttgtcatacggatccttgacgaagcgggagagcacgcactcgccgtgggcgggcaggtcctcggataccgcgaaggcgttgatgcgggcggcgagggccttgaggccttcctcgtcgtattcgatgacttcgaccggcttcatgaaggtgtgcacgccgaggcctgcggcgaagcgggcggtgccgccggtgggcagcacgtggttggagccggacatgtagtcgcccagcggcaccggggagtacggaccgcggaagatggcaccggcgttcttgatgcgcttgacgaccgcatcggcatccttggtctgaatctcaaggtgttcggcggcgtaggcgttggccgcgtcgatggactggtcgagaccgtcggtcagcacgatggcagactgggtgccggacagcgacgtgtggacacgctcggcgtgctcggtacgcggcacgcggtacttgaggctctcctgcaccttgtcggcaatctcggtggagtcggtgaacagcacggaaccggcgagctcatcgtgctcggcctggccgatgaggtcggcggccagcaggctcgggttggcggtttcgtcggcgatgatgccgatttcggtggggccggcaaccgcgtcaatgcccacgaatgcggagaccagcgacttggcggtggccacgaagatgttgcccgggccggtgatcttgtcaaccggatcgcacaggatgtcgccgtcctgcggctcgctgcccttggcgccgtatgcgaacatggcaatggcctgagcgccgccgaccgcgtatacctcgtcaacaccgaggatggcgcaggtggcgaggatggtcttgttcggcaggccttcctcattgtcgcgggcgggcggggtggcgatggccagcgattcgacgccggcggcctgggccggcacagcgttcatgatgacggagctcgggtagacggccttgccgccgggcacatacaggccgacgcgctgaatcggaatccagcgttcggccacgcgggcgccttcggcgaggtcggtgtagaagtccttcggcacctggttggcggccacggcgcgggcgcggcgcaccgattcctcgatggcggcgcgcacttcggggtcgagcgtggtcagggcgtccttgatcgcctcgaccggcacgcgcaggttcttgggacgcacgtgatcgaacttctcctcgaagtcgcgcagggcagcggcgccgcgttctttgacatcgtccagaatcggacgcaccaaatcggtggcttcggaagtacccattgcagcacgcggcatcgcggcgagcagttcggcacgggacaggttctgaccacgcaggtcaatgattcgcatgatgttctcactcataaagccccatcgtaccaatgtgcgaggcctaagcggcgaggaacgcccatgttcacccgtatcgtgagattatcgtgcgtgatgtgggttcgtgatgcaggttattgacgcacgccaaatgcccgagcggtctcatcgataatcggcatgtcatgcacggcgacgtgactcacttcggaccatcgcgggccaatggctaattgctcaaccaaggcttgcactgcgtcgctgctaccttgtgcctccagctcaaccgagccatcgcgacaattacgcacccacccctgtacaccaagccgacgtgcctgagtcaccgtaaaataacggaatcccacgccttgcaccagtccggtgaccactatatgtttgcggaccaaattcgccgattgcctcatgatgctaagtccctaatccatcgttcgcagcattgggtagaggctcaggaatcgccggtatgcgtcggcatatgtgcgtgcggtgtcaggattcggctggtatacagtgcattcgcatactgattgcagcaggtctggtacattgaataccaacgaggccattgccactgctggcagaatatcggcattggcgaacacttcaataggatgctccaacacatcggccagaatctggcaccacgcattttctctggctccgccgccaatcagggaaatctcggtgggtttggcgtcaaaactttccataccttgacgaatggagaaggccacaccctcaagcgcggcacgcatcatgtctgccttggtggtgtctggatcgaggcctacataggccccgcgaatattcgggttcattacggggaatcgctcccccaccagatatggcaggcatagcacaccgttggagccgggtttggatgtttcgataagctgatgcgcctctgcgtaatcgccatcggcgaatacgccggtaacccatttatgcacgtcgccggcgttgaggaatggcacggcattcacgaagccttcttccacaccaaatgccagattcgcagcacctggcttgtcggtgaacggctcgggcgaaacggtggcgatccagcctgaggtgccgatattgatgttgtattgaccaaggtggctgacaccgctggcaagtgtggtggcacccgcgtctccaatgcccgcgtataccgcagttccggcggaaaaaccggtgcgttgtgcagcggattccgtcactgtgccaatgttgtcttgcggattgtgcaggtgtggcaatatggtcatgtcgatttctgcgacctcgcataattcggcatcccactggccattacggatattcatggccccagctgtggaacacgccgccacatcgcccacgcattcgccagttaattgggcgatcaagtagtccttggaactgatcaatacatgacgaatgcgcgcgtacgtttccggctcgtgttcacgcagccacatcaacttgggcaacggcaagcagccttcgagccggttaccaacggtgttcaggaaacgttctgcaccgccctgatatgtctcggcgagttgcttggcctgttcctcggctcggccatccgaatacagaatggcattgcggacgggattgagctcgccgttcaaaacaataacatcctgcatctgaccgctgaaaatgcccgatgtctatttagaagtgcaacacccttgttggtcctgtaattctaacagttcgtcggcgaacgcctcggcgggcgtccggtagccgagcacgcgcatggggcggttgttgatctcgtcgacgatctccctgacctcctttgccatgtccatccggatctcgcagcgtttgggcagataccggcggatcatgccgttgcggttctcgttgcttccccgctgccagctggagtacgggtcggcgaagtacgtggccatgcccagcccgtcgcgcagcctttcgtggtgggcgaactcggtgccgttgtcgtgcgtgacgctgacgcgcgcgccggccggcagcggcgagaacatgtccagctgcgccccgacgctctcgccggcggtcttgtccggaacgacgcgggccatgaggaacctggtcctcctctccacctcggtgtgcaggttgcatcccactccgatgacgctgtcggcctcccaatggccgaacgcgctcctgccgtcggcctccggcgggcgttcggagatgggcactcggccgggaatcgggaagcgcgacgtcctcctgccgccgtgcctgcggcgccgcctgtgccctcgcggcaggcaccgcgcccagcgttcccgaagcggcctgctggagtagacccatcggtagatggtctccgggcacacgcgcatgagcgcatcgtccggccacaggacgcgcagcctgccgctgataagcagcggcgaccagccgcggcccagccattcggccacctgcgcccacaggcggtcgtgcgacagccggtagggctttcgtggcttggatctcctgcggtcggccttgcgctgcgcgggcccggcgatgtagtagcggccggtccatggccccgccttcagtcttttcggccggtacgggcggtacgactcgttctcgttggacgggaaccatgtgttgcgcttgatctcccggctgatgctggacgggctgcggcccagcatcgcgccgatcccgcgtatgctggcgccgttgcctacctcgatctggatgacctggcgttcctcttccgacaggtgcgaatatacttctcccataggtgcgacatcccttcggactggttttctaggcaatttccaatctaacgggtgttgcactttcatttagacaacgggatgatgccacgaatgcgagtcacattgaattctgactcggattgccgcgcctgctcaatcatgtgcctggaggccgagcagagagcttgccaccattgatcggggctctgctcccgatagtcgccgttgataataaggtcaagttcgctactcgcactagctacaatgcaaccctgcccattaactaaggcacccttcaacgccgtggtccccgcatcaaatgcagccacatattccgtagtcatatcgttcatcgtagcgctgaaaaaaaaagaagcattctttgccagcaaaacgcggcttattgcatcgtcttgtttctagaatgggaaattgaacgaatactacgactagtgaggcattatggcaattcaatcgacaatcatgctgaacaacggcactgtcatcccgcaggtgggcttgggcgtattccagacaccggatggtgatactacagtgaacgcggtgcagacggctctggagaatggctaccgccatatcgataccgcaatgatttaccacaacgaggcttcagtgggtgaaggtattcgccgtgctggtgtgccgcgcagcgatttcttcttgaccaccaagctgtggaatgacgatattcgcgcacgccgcggcaaggatgcattccaagaaagcctcgaccgcttgggcgtggattatgtggatctgtatctgattcactggccggcagacggctggcagcaggcttgggacgacttgcaggagatttatgcctctggccgtgtcaaggccattggcgtcagcaacttccaaaagcatcatatcgatgagctactgacccatagcgatgtggtgcctgctgtagaccaggttgagtcttccccacaattcaccaatcaagagcttattggccagctgcgtgccaagggcatcgcaaccgaggcgtggagtccgctcggcggcaccggcggtaacctactcagcaacccagtactggccgaaatcggtgccaagtacggcaagtctgctgcacaggtagtgattcgttggcacatccagcgcggtatcatcgtgctgcccaagtccactcatgccgagcgtatcaagcagaacttcgaggtcttcgacttcaacctatcggtcgatgatatgaccgccatctccgccatcaacaccggcaagcgcaacggtgctgatccggacaatttcaatttctagacctttatcggtccagatacgcaaagtgggaactctccgtcattggagggttccctcttctatatgctttcgattcggccacgccctaggtgcgagagcctatgtcttgtcggtgtcttgtcttgttggtttcgggtatgcgaaagccccttggggcgtgtgctccgaggggcttcctgtacgtgtggtgcggcggcgtgctactctcccacaccctgtcgggtgcagtaccatcgccgtgccaggccttagcttccgggttcggaatgggaccgggcgtctcacctgggccatggccgccgcaaatcttctcttgtacggtcagacgctggggtctgccggcctgtggcggcctgggaaccggacagcggacgcggatatgtcgatgtttcgtcttgtggccagacaatgctcattgccgtctggtgtcgtttgcaggaggaagatgcggtccaaccgccaggggttggaatgtcagtgttgcctttcgtccgttagtaccggtcggctccacccctcgcggggcttccacgtccggcctatcgaccacgtgttctgcatggggactacaggaactcgaaggttccacggaatgcttatcttggagcaggcttcccgcttagatgctttcagcggttatcccttccgaacgtagccaaccggccgtgccactggcgtgacaaccggcataccagaggttcgtccacccaggtcctctcgtactatgggcaggcctcctcagcattccaacgagcgcagaggatagagaccaaactgtctcacgacgttctgaacccagctcgcgtgccgctttaatcggcgaacagccgaacccttgggacctgctccagccccaggatgcgacgagccgacatcgaggtgccaaaccatcccgtcgatatggactcttgggaatgatcagcctgttatccccggggtaccttttatccgttgagcgatgccgcgtccgtacaccggcaccggatcactagtcccgactttcgtccctgctcggaccgtcgtcctcgcagtcaagcccgcttgtgcacttgcactcgccacccgattgccaaccgggctgagcggacctttgggcgcctccgttactctttgggaggcaaccgccccagttaaactacccgccaggcactgtccctgaacaggatgactgttcgaggttagacatccaatgcgaacagagcggtatttcaccttacggctccgcgcgatctggcgaccgcgcctctcggcctcccgcctatgctacacaatccacaccgaatgccaataccaaggtatagtaaaggtcccggggtcttttcgtccttctgcgcttaacgagcatctttactcgtactgcaatttcgccgagctcctggtcgagacagtggggaagtcgttacgccattcgtgcaggtcggaacttacccgacaaggaatttcgctaccttaggatggttatagttaccaccgccgtttaccggggcttgaattcaccgcttcacccgaaggctgacggatcctcttaaccttccggcaccgggcaggcgtcagtgcatatacagcggcttgcgccttcgcatgcacctgtgtttttggtaaacagtcgctaccccctggtctgtgccacccccaaaagctcccacagcaagtgtgttcaccatcgggggtctcccttaaaccgaaggaacgggagtgatttgccgagttccttgaccaggattcgctcgatcgctttggtattctctacctgaccaccagtgtcggtttggggtacgggcggcttcgagcctgacgccgaagcttttctcggcagccgggatcaccggatatcgggccataaggcccccatcatcgcacctcggacccatgcgggacggatttgcctgtcccacgccctgcgtgcttgaccacggaagaccacctccgcggccggctacccttctgcgtcactcctgcgctgacctactacaaggatcggtcccaacaggccagggcatcccgcccccgaaggagcagtaagcccggacccggaggttagtactccaagcctcggttttggcggctgaaagccggtacgggaatatcgacccgttcatccattcgactacgcctgtcggcctcgccttaggacccgactcacccagggacgatgaacgtggccctggaacccttggtcatccagcggacgggatcttcacccgtctctcgctactcatgtctgcattctcactcccatgaagtccacggcgcgttcacacggccgcttcgcccctcatgggacgctctcctacccagtacaaaatactgccgcgtcttcggtggtgtgcttgagccccgctacattgtcggcgcggaaccactagaccagtgagctgttacgcactctttcaagggtggctgcttctgagccaacctcctggctgtctatgcgactccacatcctttcccacttagcacacgcttcgggaccttagacgacggtctgggctgtttccctttcgacgacgaagcttatcccccgccgactcactgccgggatacgcgtcaccggtattcggagtttggttgctgttggtacccgatacgggcccgcaagcatccagtagctctacccccgggacgtaatgacccgacgctgcacccaaatgcatttcggagagaaccagctatcacggaatttgattggcctttcacccctagccccaagtcatccccccggttttcaacccaggtgggttcggtcctccacgcggtcttacccgcgcttcaacctgctcagggctagatcatcccgcttcgggtccaggacacgcgactcaaacgccttttaagactcgccttcgctacgcataccccacacgggttatgctcgccacatgccactgactcgcagactcatttttcgataggcacgccgtcaccccacaaaagggctccgacggattgtaggcgcacggtttcagagactgtttcactcccctcccggggtacttttcacctttccctcacggtactcgttcgctatcggtcagacaggaatattcaggcttacccaacggtctgggcggattcgcacggggttccacgggacccgtgctacttgggagacgcgatcggcagaccatgcgcgttcaggtacggggccctcaccctctgcggcccggtattcaacccggttcccctgacacatggttttctgcaactgccggccggcccgtcggagccggcgcacgcgatcccgcaacaccccgcgcgcaacccccgacgggtatcacacgcgcaaggtttggccatcatccgctttcgctcgccactactcacggaatatcctttcctgcaggtactgagatgtttcacttccctgcgtaccccccggccgaagccggtaccgacccatgacggtcggtgggttcccccattcggaaatcctcggatcaaagccctgttggcggctccccgaggcatatcgcagcctcaaacgtccttcatcggtcctgtctgccaaggcatccaccatacgcccttgcaagcaacacacaccacgaaagtgcatggccgcaagattcctctagcaaattcccagacgacaaatcatcacactaaaaatgatcacaaaacgatcgaaacgaacaatagagttcgattcgaaatcaacagcaaaacaaagattcaaaaacccttgttttgctcgcgtccactatccagttctcaagccaccacgcaccgccacgccatcgcgccggcacacggccggcccccaggcacgacgggcatcgaatcgcgccaggcaaaaagcctggggtggcgatccgggagcccaaaagcgcatccataccaccccgcacccaccgcacgaccggcggggcaaagccaacgacgtcttccacaccagcaaccccgccgccatcgcaccatgcgacgcgcggggcgcacaccgtcggacgaacatccgactgcattctccgtagaaaggaggtgatccagccgcaccttccggtacggctaccttgttacgacttagtcccaatcacgagcctcaccttagacggctccatcccacaaggggttaggccaccggcttcgggtgctgcccactttcatgacttgacgggcggtgtgtacaaggcccgggaacgcattcaccgcgacgttgctgattcgcgattactagcgactccgccttcacgcagtcgagttgcagactgcgatccgaactgagaccggttttcagggatccgctccgcgtcgccgcgtcgcatcccgttgtaccggccattgtagcatgcgtgaagccctggacgtaaggggcatgatgatctgacgtcatccccaccttcctccgagttaaccccggcggtcccccgtgagttcccggcacaatccgctggcaacacggggcgagggttgcgctcgttgcgggacttaacccaacatctcacgacacgagctgacgacgaccatgcaccacctgtgaacccgccccgaagggaagccgcatctctacgaccgtcgggaacatgtcaagcccaggtaaggttcttcgcgttgcatcgaattaatccgcatgctccgccgcttgtgcgggcccccgtcaatttctttgagttttagccttgcggccgtactccccaggcgggatgcttaacgcgttagctccgacacggaacccgtggaacgggccccacatccagcatccaccgtttacggcgtggactaccagggtatctaatcctgttcgctccccacgctttcgctcctcagcgtcagtaacggcccagagacctgccttcgccattggtgttcttcccgatatctacacattccaccgttacaccgggaattccagtctcccctaccgcactcaagcccgcccgtacccggcgcggatccaccgttaagcgatggactttcacaccggacgcgacgaaccgcctacgagccctttacgcccaataattccggataacgcttgcaccctacgtattaccgcggctgctggcacgtagttagccggtgcttattcaacgggtaaactcactctcgcttgctccccgataaaagaggtttacaacccgaaggcctccatccctcacgcggcgtcgctgcatcaggcttgcgcccattgtgcaatattccccactgctgcctcccgtaggagtctgggccgtatctcagtcccaatgtggccggtcgccctctcaggccggctacccgtcgaagccacggtgggccgttaccccgccgtcaagctgataggacgcgaccccatcccataccgcgaaagctttcccagaagaccatgcgatcaactggagcatccggcattaccacccgtttccaggagctattccggtgtatggggcaggtcggtcacgcattactcacccgttcgccactctcaccaccaagcaaagcctgatggatcccgttcgacttgcatgtgttaagcacgccgccagcgttcatcctgagccagaatcgaaccctccacaaaaaaacctcatgaaaagcatccgaatagatgactctcaaaacaaaaattgacgagcacgtccttaaggaaggacgccctcaaaaaacctcacccctcatcaaaccctcccgggtacccaaccaccacgacaggcaatcaggcgaggaatgaactggcaatcattgactataaagaagtagtacaaacacgctcttgagttctcaaaccaccaccactcacccacctcgcggccctccggaaggagaaccactcgccgagcggcagcaagggaataacttacacgcattcgcggacttgcgcaaaccgggcacgaaaaaacacgccagcatcgttgcaacgacggcgttccatcggcgtgtcgaaatcagcttgaatcacgccgttaccatcaggatacgccggctctttatgggctcacgtaacgaaatcagatgttcaccggcgtgtcgcaacaatttattccacgttcaactcccctcagtccgatcacgcggacggctcacccgcaattacggacgagcaaagctcgcacccttatggctcgactatcgtctcgccttcgtctaaaaaacagtccaccggactgttttttagacgcctcagcatcaaagaggggagccaaagggggattagaaggtcaggcgcatctgatgccagaccacgtcaccgtgagtggactccgaaatgccctcgtcctcatacccaaattgcgcatagaatccgaccagccgatctttgcaggtgagcaccaagcctttacgtccagctgcacgagtgtcttcaatgactttcctcatgagtgtactggcgcaaccgcgatgctgatacttcggcgcagtatccacgccgaaaatcatttgccagtcaccttgagggttgtgctgcgcggcatcctcgtacatgtcatcggtcaagtcgcgccgatcggtcgcgaaaccgttgatgaacgccatgacgatctcgccatcaatcaatagccagaaacattccggataggtctcgattcgggcgcgcagggacgagcggtcggcggcctcggcggccgggaagcattcggattccatggcggccagcgcgtccagatcgtcgatggtggcgtggcggattaactggggatcagaatcagtcatgtttttgtctttctcttaacactccgttgtgagcaactccccccagtcacgcttcgcgtgccagtcgaggggagccagatggatgtcagattacgcggtattcgcgtaacagggtggcaatatcggtgccgtcgagtttcttgagcaccttcttgaccacggccttttcaatgaagttgagcttcatatcggtgaccggtgcaccgtcacgcaatttgacggtggcgttgagcaggttgcgcacgtcatagacgctaccccacacttcaggcacgccgcggtccacgccgagcaacgtgtagacagcttccataccggtgcgcatcgagtattcggtggtgaaaatcgtgtcgcgcggggtctcggcgaactggccaaggaatgcgaagttcacggcaccatcgggcaccacgtccgggcggtcgccggccgcgcgcggcatgaagaacgcggtgatgtacggcatcatgaccggcacggtgttggcgtggtgctttgcgagcgcctcgatcttgtcggtcggcacgcccatgtggtaaagccactcctcgcaaatctcttcaccggtgcattcggtcatcggcttcttcacatagttgccgggcttgtccgggaacagaccgtagacccatacgcacagctggtccttgggctggtcgcggaactgctgctggcggttcagggtccaactcatgagccagttggagtcctgcacggtgacgatgccgccggtgacgaccttgccggagaacgggtcgcgcttgcagatcttctggatgtacggcggaatctcgccgtccagggtggtgacggtggcgctcatccacttggtggcattcggatcggagcagaacttctccggatggccaaagctcgggtcctggtcggcgatacgcttccacatatcccagccgccaccgggcttcagatctgggttccatgcggcgggcgagttctgggaacccatggtggagttctccacgcaaccgccgttggtgatgaacaccagatcgttctcggtcaggtcgatggaggatttatcaccctcgtgatccacgtcgatgcgcacggcaagcttcttggtgggcgtgctggcagggttgcgcttgaagaaaccggaggtggcctgaatcttctggatggtgtcttggcctacgccggtgcgctcgcgcttggggccggctcccccgccaatcgcgaattccacgttctcgaccttggtgttgtagcggaattcgacgccgtgcgattccagatacttgaccatcggcagaatcatcgactcgtactggttgtagcgggtgaaacgcagcgcggaaaagtccggcaggcctccgatgtgatgaatgtagcgcttgatgtacagcttcatttccagcgcggagtgccagttctcgaaggcgaacatggtgcgccagtacagccagaagttggagttcagcacctcatcatcgaagaaatcggtgatcggcttgtcatacaggtcttcgtccggggtgaagaacagcttcatgatttccatcgaagccttgtcggacagcccgaacttgcccttgagccccgcgtccttgccgagattcttggtggcgcggcacagcgagtagttcggatcctccttgttgagccagtagtactcgtcgagtacgctgacgccttcggtttcgatggagggaatcgagcggaacagatcccacatgacctcgaaatgattgtccatttcgcggccgccacgcatcacatagccaaggccgggaatatcaagaccgtcacaggcgccgccgggtaccgggtccttctcaaggatgtggatgttctcgccaggcatctgaccatcacgcaccagataacaggctgcagacaatgccgccagtccggtaccgatgatgtatgcatgcttgttgtccacgtcggccggcttcttcggacgtgcgaaagcctcataattgccgctgctgtagtacatattccgcctccttggggcagagttgacacttcatcaactcttcttgaatagacatcatgtcgcattattgacgaacgcgccataggcaacgttcggcgttctgccgtattcgccaataccttgcatctacactattgaaggcatacaggcatactgaggatgcggggtgcttcaccgaaccggatgattgataaggtcccgctcaatccatgccatgaccaaatcggcaagtcggtttacctccgcttcggcgagttcacggcctttgggcagatgatgccatttttcgatgcatccgcggcagcatgtggcggtagcatgctgagcggtgaataccggatggccgcgccatggcgtctgcctgccgtcgttcttcggttcggctgcgcctatgcggtctcgcaacatttctcgcgcatgacgatcgatggtcgccttgcctttggtgcgggcataggctcggtctttgtcggtcaaagcgaatttggcgcggaactgcgaatgagacagccgttccagcatcgtggcaatccattgttgctcgtcatcgttgttaccagtatccgccatctccatgcccatacgttccacagtagtcgcgcacatcgtatggtggcacatgccttagctccctctgatgaaggagtccccagcaaagccaggtgagggagaggccaggggcgaaatccgccaatcaggcggcaggcaagcagctggggccaaacagaatcttgatctcagcaaacaacgaagtatcccgcttgacgcggaaacgatcgccaaacgtgagcacctgagcgttacccttctcatccagcaccgcaagatgtacttcgcagtaaccaggatgattagcgagcacctgaccgagttgcatcatgcgttggcgctccaacgccaccggcggcagcgtgatgaccaacggacgttcatcctcggcttccaaggtcggaatctgcatttccgtggctctcagagaaacggtttcgtcgcgcaactccacttggccgcgaatctgtacgatggcgtccacggcaagttcggcggcggccgcttcatagaccttgccgaagaacatgcattggatggagctttccatgtcttcgatggtcacgatggcccaggggttgcccttcttggatacgcgccggtccacattggtgaccaaaccagccaacgtgacctgctgtccttcacccatcgttttggctcgatcaaccagatgcgcgatggacatttcacgcaaggacgcgagaatcgactgcataccggagagcggatggtcagacacatacaggcccaacatttcgcgttcgaagctaagtttggtcttcttgtcccattcctcaagatcgggtacggtcacggaagcgtcgcccatggcctccgctcccccatcctcggcatcggagaacaaatcgaactggccctccgcctgtttgcgcttcagactcaccaccgaatcgatggcggcctcgtgcacggtgagcagcgcgcgacggttcgggtcaatcgagtcgaaggcaccggccttgatcaacgattcgaccaatcgccggttcagcgcggtcaggggcacgcggcggatgaagtccatgaagttcacgaacttgccgcgcgggccttcgcgttcggcgatgatatcggccacggccttgtcacccacgttacggatggcaccaagaccgaatcggacgacgtcgccgactgccgagtactcgtacaccgattcgttgacgtccggcgagagcacctggatgcccatgcggcgggcctcgcccaagtacagtgcggtcttgtctttgttggtggcggcaccttgcaacaaggcggccatgaactcgaccgggtagtgcgttttcagatatgcggtccagtaggagatcagaccgtatgcggcggagtgcgctttgttgaaagcgtagccggagaacggcaccagaatatcccacacggcctgggatgcctcttcggaatatccgtgctccttcataccggcgaagaacggcaccttctccttggccagcacttcgggcttcttcttacccatggctcgacgcagcacgtctgccttgcccagtgaataaccggcgaggattcgggcggcggactgcacctgctcctggtagatgatcagaccataggtctcgtcaagcacctgcttcagaggctcctcaagctcagggtgaattggcgtgatcttctgcaggccgtttttgcgcttggcatagttggtgtgcgaatccatactcatcgggcccggtcggtacagggcgataagtgcggaaatatcgttgaagttatcgggcttcagggttttcagcagcgaacgcatgccgtcggaatcgagctggaacacgccgagcgtgtctcctcgggacatgagtttgtaggtttcggcgtcatcgagcggaatcttggtgtagtcgatggcgggtttgccgttggcctcgatgttcttcagggtgtcgtggatgatcgtcaagttggacaggccaaggaagtccatcttgaccagccccaacgtttcgcacgtgtggtattcgaaggtggtggtgatggtgccatcggtgcgttccagcaacggcgaggtgtcggtgatgggtgcgctacccatgatggtggcgcaggcatgtacaccggtctgtcgaatcaggccttcgatacccttggcttcctcggtgatgcgcttggtgtccgggtcggaatcgtagagttctcggaattccctggcctcggcataacgtttggcggccgggtcgaagatgtcatgcaggctgatgtctttgccgccggtggccgccggaggcagcgccttggtgattttttcaccgactgagaattcataacccatgatgcgggcggagtctttcagggcctgcttggttttgatggtgccatagatcacgcactgggcgaccttatcggtgccgtatttttcgccgcagtattcgatgactcgcgcacgaccttcagggtcgaagtcgacatcgatatcaggaaggctcactcgctcagggttcaggaacctctcgaaaatcaggccatgcttgagcggatcgagctcggtaatgcccatggaataggcgaccatggcgcctgcggccgaaccacggcccggacccaccataatgccgtggtccttggcccactgaatgtagtcggcgaccacgaggaagtatccgcagaactgcatctggcagatcacgccgcattcgtagtcggcctgcttcaatacgtcgagcggcgggttgccgtcgtaacgcttctccagaccttcctcgacttttttgaggaacagggaggtctcatcccagccttcggggcaagggaatttcggcatgaacgcgccgtcttcgtggtcgtcgaacatcacgttgcagcgctcggcgataacgagcgtattgtcgcaggcgtccgggtggtccttgaacagttcgcgcatctcttcggcggttttgatgtagtagccggtgccgtcgaacttgaatcggtccggatcgtcaagacgggaaccggagttgatgcagagcatggcgtcctgcgcctgtgcatcttcggcgtgtacgtagtgggaatcgttggtggccagcagcggggcgtccagcttcttggcaatggtcagcaggtcgttggtgacctgggtctcgattgtcagaccgtgatccatgagttcgatgaagaagttgtctttgccgaagatgtcctggaattcgccggcggcgcgcagggcctcatcgaattgaccgaggcgcagacgagtctggatgatgcccgaagggcatccggaggaggcgatcacacctttggaataggtggcgagcacctccttatccatacgcgggtagcgcatgacgcgaccttcgaggttggccacggacgaggctttgatgaggttgaccaggccttcgtcgttttcggcccacatggtcaagtgggtgataagaccaccaccggagacgtcgtcgcggcgctgggcttcggtgccccagtgcacacgggacttgtcttgacgcgcggtttccggggtcacgtaagcttcgatgccgatgatgggcttgacgccattggccacgcagttggtgtacatctcgtaggcgccatgcatgttgccatggtcggtgataccgaccgcaggcatgccaagttcggccgcacgcttggccaaatcaggaatcttcgacgcaccatcgagcagcgaatagtgcgtatggttatgcagttgcacaaagttgttcccgtaatcagccatgcgctccaccataccgtgtggtctgggcggctgttcagcattcccgtcggcactccgcgatgagggcggcgcacagcatgatgacctgggcgacgagattgaaccacaccagcgcgccgatcaacgccgcgaacggtgcgagcagcggattgcgggaggcgccggtcagcagtcgcgcgccgagcagctgcatcaccgaaaccgtcagggaacccgacgacgcgccgatcagcgtgaatcgtccggctttgatgtgcgcgaccacacgcaacagcagcatgaacaaggcgaagttcagcgcgacgccggtgcagaaaccggtcagctccagcagcagaatccccggcagcgagctgctggcgatgccgctccactgcaacacgcgccgcaccatgccaccggacaccgtaccggccgcggtcgaaagaatgaacagtattgcgatggcgatggcggcaagcgtatcgcgtaaccttgcgacgacgatattgagctcgtcgccgcagtcgtcgaacatggaccgtacggcgtggcgcagcgagttcatccagccggtcaccgtccaccagaacatggccaacgtggccagaccggtccatgtcaatgtgcttgacatggtgtttagtgcggaagacgtcagaaacgagtcggccacaccgggaatgacttcacgcaccgcgtcgatcagcatctgctgccaatcaatgttgccgaccatgataaggccgaacacgctcaccgcaatccagatgccggcaaaaaaggcgaatagcagaccatatgccagaccattcgccagcagggggccgttccgcgacacataccggtcgagcacgcgccccggcagcgaacgtgcccacgcgtacgctcccctgtcaatcgcactcttcaacccatgcatagttcaactgtagctgttgttaccattgtcccgaattcaatttgtaagtgcaacgctcgtcgggggggggtgacgttttgttggacttcgttgtctgtatggtcgttcgcaacgatagcacgcgcgttcaggcgacgagcccgagtccgatgcgtttgtccatgatgctcatgccgtattcgagtttgatgcgcttgtccctgtaccagaccatgcactcgtccaacaacgtgacgaactcgtcgatcgagacaccttggaagcttcgcttgtggaagaactcctgcttgcctgccgaagcccccggcggctgcgttgtccggactgcggcccttcgcgcccatcgaccgcgtcaggccgtggctcccgcagacgcggatccattatgcacatctcggtaggaacaaaacaacgtcaatgaagaaacctgaagaatcgctggttgtcctgtcatctttagatgacaggacaaccagcgacaagagtaatcgcctcccgttgtctaaatgaaagtgcaacacccgttagattggagattgtccagataaccagtccgaagggatgtcgcacctatgggagaagtgtattcgcacctgtcggaagaggaacgccaggtcatccagatcgaggtaggcaacggcgccagcatacgcgggatcggcgcgatgctgggccgcagcccgtccagcatcagccgggagatcaagcgcaacacatggttcccgtccaacgagaacgagtcgtaccgcccgtaccggccgaaaagactgaaggcggggccatggaccggccgctactacatcgccgggcccgcgcagcgcaaggccgaccgcaggagatccaagccacgaaagccctaccggctgtcgcacgaccgcctgtgggcgcaggtggccgaatggctgggccgcggctggtcgccgctgcccgtcagcggcaggccgcgcgtcctgtggccggacgatgcgctcatgcgcgtgtgcccggagaccatctaccgatgggtctactccagcaggccgcttcgggaacgctgggcgcggtgcctgccgcgagggcacaggcggcgccgcaggcacggcggcaggaggacgtcgcgcttcccgatccccggccgagtgcccatctccgaacgcccgccggaggccgacggcaggagcgcgttcggccattgggaggccgacagcgtcatcggagtgggatgcaacctgcacaccgaggtggagaggaggaccaggttcctcatggcccgcgtcgttccggacaagaccgccggcgagagcgtcggggcgcagctggacatgttctcgccgctgccggccggcgcgcgcgtcagcgtcacgcacgacaacggcaccgagttcgcccaccacgaaaggctgcgcgacgggctgggcatggccacgtacttcgccgacccgtactccagccggcggcggggaagcaacgagaaccgcaacggcatgatccgccggtatctgcccaaacgctgcgagatacggatggacatggcaaaggaggtcagggagatcgtcgacgagatcaacaaccgccccatgcgcgtgctcggctaccgcacgcccgccgaggcgttcgccgacgaactgttagaattacaggaccaacaagggtgttgcacttctaaatagacatcggggtaggctccgcccgcaagtcacagtggtacaattttcaggtttgagactgtagcaagttgagtcgctttatcagtaagtctgtatttggaggtatcgatggcccatcgtccgcttatcggcgtggtcccgttgtgggacgacacactgaatagcctgtggatgctgcccggctatttcgacggcatcatcgaagccggcggcatcccggtgatgctgccgctgaccgacgacgagactacaatcgaacagctggtcagccaatgcgatgggttcctggtcaccggcggccacgacgtggatccagaacggtatggcgaggcggccggccccaagacggtcaaactatgcaaggcccgcgaccggatggaggagcgcctgatcccctccgtcatcgcggcggacaagccattgctgggcatctgccgcggcatccagagcctcaacgtcgccttgggtggcacgttgtggcaggatctgccggacgaacatcccagcccggtcgtgcatcatggcgacaagccgccgtatgacccggtggtccacgaagtgtcgatcgcgcccgattcgccgttggcccgcgcgttgtggccgctgggagacaacggcccgagtgaggcggaggccgatgaggtcgattccttcggcaggccgtatcatccgcgcgcctatacgctgggcgtcaacagttatcaccatcaggcgattcgcacgctgggccagggactggaaccgatggccactgcgccggacagcatcgtggaggcggtctggatgccggccaagcgtttcgtctgggccgtccaatggcatcctgagttctctcaccgcgccgatagcaaccaacgtcgcatcctcagcgccttcatcgacgcctgctgacgcaagctcccgccaatctcgacgaaacgtcttccaagaaatggcttgcccgcatccgcagccccctaccacgacatgagcgcccttgacaacgtcaccctcggcatgcgcttcacccgtgacagcaaacaggtcaggcagcgcaaggccaaggccatgctctcccggctcggactcggccatgtcgcgggagacaagatcatgaccctctccggcggtgaacagcagcgcgtcgccctcgcacgatgcatattgaagcccggggatttgatcctcgccgacgagcccaccggcgcgctcgaccgcgatctcgcccaacatgtcttcgacgaaatgctcagcctccagcacgaatacggcaagaccctcatcatcgtcacccacgatcttggcatcgccgcacaatgcgacaacaccatcgagctacaggcggtttgacggagatattccggcagctttggtctaccgaagtcacgtgttgcccttcaatctcctcggaaatctaggtggcccatttttcaaagaatgcgatcggacgtaacgccccgtaaggagacctgcaatatgaaacgttgaatcgtcatctaaagatgacgttttcgtagatcttccggaatcgccagtcatctgcgatccggatatggcaccggtccggctcgatcgagcccggacgaccatggagaaaacgaacgatcgaatccgaacgcgggtaaagagcctgcgcgacaccattgataaagccaaatttaagaaaacagatcagtatgcataagttttacatgccttcagcctcgtcaaccggcagcgggccccagaatccagtcacagccaggcagagcgtacaacatactgcgtagtacatggcgcgaatcccaatgaccaccatcgattgatgacggccacgaatactcgtactcagccttactgctttggctcatttctgttcacttcacgctggagtaccgagacacgttgagcggaaataccggtaactcacgtacggttaccgaccattggcctgaacggtactcagcatccgcagtcacttggggtatggtcatgacggagagccatcatgaccgatctctcattattctgggatgaatccggcgaggctggaactgaatctaaatattaaaacgcatgatgcacacgttgcggaattagtccaccagaacttcggcatgctcggcaggttcagcgggttcgatgtgacgggcacgcatggcatcgagggcggcggccaggtcggccgggtactgggaccggaccgtggtccagacgcgggtgcgaggatggcggaattcgagcttcatggcgtgcagccactgccggtcaagtcccaaagcttcagacagcaccggattggcaccatacatggggtcgccgcacagaggatgcccaatcgaggagaaatgcacgcgaatctgatgggtacgtccggtctccagattcacggataccagtgtggcctcatggccgaaacgctccaacacatcccaatgcgtaacggccggtttgccagccggagtcacgcagaagcggaaatcggacactttggcgcgcccgatcggtgcctcaatggttgctttgttctctttaagaccaccctgcacgagcgcatgataggttttctttacctcatgctcggcgaactgccgacgcatctcggtgtacgcaaggtcggacttgcacaccaacatcaagccggaagtgcctacatcaaggcgagaaacaatgccctcacgcccggccgcaccataggaagtgatatgcacgccgcggtcacgcagtgatccgagcacggttggaccggtccagccaaccgaggcatgcgccgccacgcctacaggcttatcgactacaacgacatcatcgtcttcgtagacaacggccatatcagttgcgataggctcaggctcggcctgttcctccgccaaatcaaattcgacggtctcccccgcctgcaatgtgctggaccgcgcaacttcacgtcctaaaacgcgcgcctgcccggagtcaaccagatcggcggctttagatcgtgaaatacccagcattttggccacggctacgtcgaaacgcttacccaccaatgcatcgggagcagggactattcgactcattacttggcgtccgcctccggctcagactgtagggattcgtcggattgctcgatgagatccttgtgtgagaacggctcccccataagaatcagaatcaccaggaccacaccggcgactaccagatagatatccgccacattgccaacggaccagccatagttaaggaaatccaccactttgccgtcgaggaagccgtcagcgtacataacacggtcaatcaggttgcccagagcgcctgcaaacgcgaaagaaatcgccaccgaccatttcatggagacagtgcgcaccccagccacagcaagggccacgcaagccacaacggccaacagactgattacccaagtagcgcctgatcccatgcccaaggacgcgcccggattacgcaccaaggtgaaggacagcagtccgggaatcacgcgaatggtctgaccgttggataacgcggccatcgcccaagccttggtgagctgatcgacaatcagcgcagccgcggccacacatgcaaagacggccacgcgggtgcgcagccgtccctgttggttcgtcatacgacctgtacctgcctacgctcagttggtcttggacgaggtctggtcgacgtagttgttcgactcggaaacctgcgatgccagctggccgaggtactcggtgaggcgggcgcggtattcagtctcgaactgcttgaggctctggatgttgccctcgacgaccttggactgagcctgaaggttgtcgcgcacctgctcggcatacgtatcggctgcagagcgggtgttcttgtcgtacgcatcagccgcggaacgagtgttcttgtcatactcggcggcacgctgctgcacttccttctcgtagttgtcagcgtcatcgtgctgagacttggagtagttgtccgcatcctgacgagtcttgacggagtatgcgtcggcctcagaacgggtgttctgggagtaggtctcggcatccgcgtgagtctggtcacggtaagcgtcggcctcggagcgggtacgatccgaataggtgtcggcgtcggaacgagtacgagtggagtagtcgtcggcctcggaacgggtacgctcggagtagttgttggccttggtgaccagatcgttgtacttgttctggctggcctcggtgatttccttggccttgttcttgcccttctccacgtactgatcgtgcagctgcatagccagggtcagcatggcggtggcgcgctcgggctcggtgcccggcatggaagcggcgccagcgatcttctgcagagaaccggtctcggtgctcggctcaaccttggaaacctgagcacgaagctggttttcacgctgcttggcttcttcgagctgacgggacagctcagcgatctgagcggactgctgctgagcggcggaaccctgctgctgagcggcggcgagctgacgggacagctcctcattggccgcgcggaactgatcacgttcctgctgaatggcggcgatctgctgaccgacagcctcctggtcaccggaggcctgagcagcctgagcggtgagctgatcgatttgagcgttcagctgatcgacctgacccttgagctgctcattctgggaggacagcgcgcggttggattcctcggcttcgctgagcttggcagagacaagctgtgctgcctgatcattgccagcctgagcggcctgctgggcctgagccacagcgttcttcaaaccagcattctccgactcgagttgctgcacctgaccggtaagatcggagatcttcgcattaaggttggtcacgtcaggacccagagactgggtggcctgaccgccggctaccgcctgacgtccaagagcctcgacggtttccgtgacctgatcaaggaagtcatcgacctcgtcgacatcataaccttccttgaatcgaacagtctggaaggtatgctccctaatatccttcggcgtcaacagagccataaatcttgcacctcgctttggggcatcgcccgcacttacgttggtctcaagtcagaatgctatcacgaccccatcgtttcagaacattcgacgtgggtttttatgccagatatatgcctccggcgggtcaaaaacggcctcagaacactatcagaacaacactttccagtaccaccagcgcaaaatacagcacaatgaagctgacatcaagataaatcgaaccgagcggcaatgggcgaatatagcgacgtagccagcgcagagggggttcggtaatggaatacacaatattgatcagctgggccaccacaccacgtggataccagtttcgtgcgagaacggagacccagtccagaatcatgcgcacgaacagaaccgtgatatacgcgttgatgagccatgcaagaatgcggccgatcaaagagaacactaaggaaagcatgctgacagactaacaaccgcgcatgaaaagtttgctcggagcacaataagaatcggccgactccttgctgggagtcggccgaataccgatataacgtcgaatgcgaaaactactgaaccggtcagtcagcgaacaaatcgtgtgccgaggctggttttgtcggctcttcgaccttgatgttcacctgcgccgggctcaacaggaacacgcgcggagtgacacgctcgagggaaccacgcacgccgaacaccacgccggcggagaagtccacgatgcgatatgccacggcttcggccacaccggtgagattcagtacgaccggaacaccgtcacgcaatgcacggccgaccagttgagcatcctcatatgacttcggatggatggtggtgattctgttcacacgaccaccggggaacggcttggtagtcgacgatgcggcaggcgcggtggttgacgccagcggcgtgaccgtatggtcggaatcaaatgcggacttcgaagccggcttctgctcctcgtcctcctcgatgtagtcgtcctcatcgtccacaacgtcactcatgcccagataggacatcgcgtttttcatgaacccagccatggatcaatcctttcagcgcaggaagtcagggatgtcgagatcgccagccggatcgttcacggcgatattcggatgagcggaagtcggatcatcaaaaggcaacgatgcggagtcaccggtagccggtgtgaatgccggttgggcagtggcagcgggctgtgcagccggtgccggtgctggagctggctgtgccacgggagtcgcaggatcggcggcggttggcacaaccggcgtcaccgtgctctgagtgtcgtcatcttgagcggcgacggggtcaaaaccagcagcaataacagtgacacgcacttcatcgccataagcatcgtccagagcaagaccccaaataatctgggcttcagggtgaatggccttgcgcaccagttcggtggcagcagaggcctcctgcaacttcaggtcggtcggaccggcgatgttgatcagcgcaccgtgtgcgccttcgatgctttcctcaagcagcggagagctgatggcgatttcggcggcctgcgtggcacgatcctctccccgtgcggaaccgataccaaacagcgcagtaccagcaccacgaagaatggagttcacatcgttgaagtcgacgtgaatataggagttcatcgaaatcaggtcagtgatgccctgaacaccggcaagcagtgcggtatcagcggtcttgaaggcctcaatgatgccgatggaacggtcggaaagctcgagcaggcgatcgttcggaatgacgatcagcgcgtcgacttccttgcgcaggttgtcgatgccgtattcggcggaagcggaacgctgagggccttcgaagctgaacggacgagtaacaaccgcgatggtgagagcaccctgttgatgagccgcacgagcgacgatcgggctggcgccagtaccggtgccaccgccctcgccgcaggtgacgaacaccatgtcggcacccctaagcgcctcttcgatatccgactggtggtcctgggccgccttggctccacgctccgggtcggcaccagcaccgagaccacgactggacttatcggaaagggaaatcttgacatccgcatcagagcgcagaagatccttcgcatcggtatttaccgccacaaattcaacattctgtaatccttcggcaatcatgcgattgacggcattaccgccggcaccgccgacgccaacaaccttgatgttggtcttgtcgttgaactcattctgcgcgatctcgctcacgtttggctcctgtcacttcacggttacacccaagagtagcgcaaacaggctactcttggagggaaattcacgcgcagaatggcgcgtgttgcgtgtattttcagtattttctcagtaactggcgtccattgggtcgtcaccgaagagcgcctcacgctcttcgtgggtggtggtacgcgattccaaccagccatacggcaagtgcaccttcttggcgaaacgcacgcggccgcgcggtttgtcgaccacacgtggagggtattcgatggtgggatcaagcttgccgatctctcgatccacgtcggcaagattctcacactccatgaatgccttacgagtactgccgccgaccgggaaacctttgagataccaggcaatatgcttgcgcaggtcatgaacagccatcatttcatcaccttcatagaactgggtcaatagttcggcatgatgatggattacccgacaaacctcgccgaggttcggattaagacgttcaggattgtcttcaaaagcgttcttgatattggcgaacagccacggacggccctggcagccgcgtccgatggctacgccatcgcagccggtctcacgcaccatttcaagcgcgtcttcggctccccaaatatcgccattgccgaacaccggaatatcaaggtgttccttgagctctccgatgcgggaccaatcggagtggccgccgtaatattcggcggtggtgcgggcgtgtagggtcaccgctttgcagccttcctcctgagcgatatgtccagcttcaaggaaggtctcatggtcgtgatcaatgccgactcggatctttgcggttacggggatgccggccggctcgcacacggcaaccacacgctgaatgagttcagtaaagatgtcagttttccagggcaaggccgaaccaccaccgcggcgagtgactttgggcaccgggcagccgaagttcaaatccacatggtcggccatgttttcatcgaccacgattttcgcggcctgttcggtgatggagggattcacaccgtagagctgcagcgaacgaatcttctcgctactggcaaaatggcacaggcgcagagccttggggttgcgcgccacgagggcgcgtgcggtaatcatttcggccacgtagagaccgtcgggaccatattcctcacagatcacgcggaatggccagttggtcacacccgccatcggcgacagcaccaccggagtcggcacagtgatgttgccgagctgaaccggggcaatgtgtacctgcgtttccgggcgtgatggagcgtccgtgcgcggatcgaggttgttggtctcgtgagtagcggtgatggtggtttccatatccatgctcttgctcccgctggcgggagctgtcgaaccgtaggtgagaccgagggtggtcttccttgtgcagaaaagaccaccctcagtccggctgtcgccggccagctcccgccagcgggagccagtcaccttgatatatcaggctttagtacaggccgccggcttcctgaacgccggactcaggccaggcttcaccacccatctccacgggcttcagcggcacgcgggtgcgcttctcgccgatgcgggcggccacgtaatcggccaccttgtcaagagcgacgcgctcctgggccatggtgtcacgctcacggatggtcacggcgtggtcctcgagggtgtcgaagtccacggtgatgcacagcggggtgccgatctcgtcctgacgacggtaacgacgaccgatggcaccggactcgtcgtagtcgattatccattcgttgaagcgcaggtcgtcggccaggttctgggccacggtctgcagttcgggcttcttgctcagcggcagcacggcggccttgaccggggccagacgcgggtcgagacgcagcacggtgcgcttgtcgacgccgcccttggtgttcggggcctcgtccacatcgtaggcgtccacgaggaagcacatcagggagcgggtcaggccggcggccggttcgatgacgtacggcacgtacttctcgccggtggcctggttgaagtagctcaggtcttcgccggagtgcttggagtgcgcgctcaaatcgtaatcggtacggttggcgatgccttcgagctcaccccagtcggaaccctggaagccgaacttgtattcgatgtccacggtgcgcttggagtagtgggagagcttctccttcgggtgctcgtagtggcgcaggttctccggcttgacgccgaggtcgatgtaccagcgggtgcgggcgtcgatccagtactggtgccattcctcatcggtgccgggcttgacgaagaactccatctccatctgctcgaactcacgggtgcggaagatgaagttgcccggggtgatctcgttacggaaggacttacccatgttggcgatgccgaacggcggcttggaacgggaggaggtcatcacgttcttgaagtccacgaagatgccctgtgcagtctccggacgcaggtagtgcaggctgttctcgtcctcgaccgggccgaggtgggtgcgcagcatcatgttgaagtcgcgcggttcggtccactgtccacgggtgccgcagttcgggcagacgatgtccttcatgccgttttccggcatcttgtcgccgtgcttctcggcgtaggattcctcgagcttgtcggcgcggttgcgcttgtggcagttgagacactcgacgagcggatcgttgaacacgctcacgtggccggacgccacccacacttcgggcggcagaatgatggaagtgtcgacaccgacgacatcaggacgggtgacgaccatggagcgccaccattcacgcttgatattgtccttgagagcgacgccgagggggccgtaatcccaagcggaacgggtgccgccgtaaatttcgccggcggggaacacgaagccgcgacgcttcgcaagggatacgacttcatcgagtttggactgagccacaatgcaccttctggtttgaacggtttggggacttaactggcgtttcgccagtgtaacggtacagtgtgacagtcccctacaccgcccgtagcgtctccacgtagcgccggccgatcacgatgcgcgcgatcgcgaacaagacggccacgacggccagcatcacgatgaacggcagcctttgcggccagccccataccattgtggcggtgtttacgccggccagcagtcccatgggtatataggtcagatatgccgttgcgacgagactgtgcaggttcgtgctcgtggtcgccattgttatcagggtgatgcagcaactgaccgcgaccgccgagccataggcggtcaacaggggcagcgagacgaggtctgtccagccgagtccgccgaacgccagcaggtagccgatcaggagcatcatcgacaccgccagcggaatcagcgcgaacagcatgcgcgagagtaggtatgcggccattgggcgtcccgattcgcggaacgcgcgttcgctgtagcgttgcgcggactcctcaaaactccatccgctgttgcccagtgcgaggctgccagcctcggctgccggttcataagcgaacagcggcacccagatcgccatcagcgacgccgtgatggcgtgcacctgctgcgggctgaagccgttcgactgcgcggtgccggccgtatagctcgtgatggcgatcgccagcaccaggttgccgatcagcaccgcccagaagatgcctcggtttttgcacacctgccagtcatgccagaacaatgccttcatcatctgtctccttgcctgatgcctaccgaatgccgaagtcgacggattcgtcagcggtgcggccaagtgtggcggcctgtttgaacgcgtcgaagtcctggaagtcgtcaagcatcatgtccttggcgatgtgcctgtcgtcgaggatgacgaccctgtgggccacactccagcagtattcgagatcgtgcgtgatggtcaggatcgtgcggccggaatcgctcagctgccccatcaggtcgatcatgaggtcgcgggtgatcgggtcaaccgagttggtcggctcgtcaagcaggatgacgtgtggctcgaacagcatgccggcgacgagtccggcgcgtttgcgcagaccgcttgacagccccttgaccttcttgtcgagatgctcggtcagtccgaacgcctgcacgagcttctcgttttccagatgctcgaggtcgatggtctgccggccgttcccccggcccgtgtccataagcatggcacggaaccgtatgttctcacgcacggtcatggtcgcagcgaggttcgatttgtcggacaactggaacacgtcctgcatgctcggcacgaggtttgcgttgatgaccgcttcaccggatcttggtcgcaatagcccgacgatgatgttgaacagcgtggtcttgccgacgccgttgtatcccaggatcgccagcgactgtccttgcggcacgtcgaagctcacatgctcgagtaccgtcttcttgcgcgtgtatccgaacgcgacatcgcgcaccgcgatgatcgtccgactgttttcaggcatacctgcccctttccccaaaatgaacgcttctttatttcccaagggatactgtgagccccatcacttgctcccccccctgaagggggagcaaagaacgcggctcatagttcccgccgcgtatcgacgaaccgacagtcgaacaccgcgaccgcgacggcgacaagtcccgcggcaaccacgacgaaccccatcatcttggcggccagtggaatccatgtcagcacgaatctcgaaccggccaacccggccagtgccacggccgacacgagcatgccgatcacgacattgccgccggtcagcagcgcgccgagcgtggtgaacacgcagaacagcacggtcgccgtcagcgtgaacgcgatcagtcccgcatccgtcacaccgatcaccctcgccgcgactaacaggatcacgacggcgtatcccgcgaccggaaccgtgcccaacagcagcttttccgccacgtactcccccatgggccgtccactggaccggaacgtctcgaggacaccgtcgctgcaatcccctccgaccgaccccgatatcaccggcagtacaacgatcatcagcatcgacgccagcgcggcggacagcccagccgtcgcgacgacggcatccgcacgctcgattccgtcacggatcagcgacgccaacggcaatgcgcagccgatgaccacgaacgtcagcatcacccagtcatgccgcagccgtcccagatcccgatacagcaatcctttcatgatccccatcaccgcgccttgtcatagcgcggctcggcagggtccggcatcacgccggcgacgatctgccggagcgcctcgacatgcgcgttgaacgcggtcagcccctgcccggtgagcgacacccaggtgatcgggtaccgcctcgtaagccccggtttcttctcgatcgtcacgtatccggcgtccgtcagggttttcagatgcttggagcatgtcgcgtcgctgatgccgagcgtgtcgcgcagcgcatcgaaccgcaccgcgtcggaggcggacaacaatccacagatgcgcagccgaatcggcgcgtggatcacttcgtcgaaatgcggtgccacacctcttgttccgtcattcccaccgtccgcccattcagtcgtccgctcactcattgcagattccttccggccatgtctcgcaacaactcgtcctcgagtagacgcatcagataggcgaatccaccggccgaagcggcgacgaccggcagcatccacagcagcggtacgccctgcaggccggcggccatcatcagtgcgcagccgccccagcacaccgctgtggcgcccgtcaggcacatccacgctcggccggtcatgcgacgcagacgatgccggtctctgaccatcaatccgcattcgcgacggacccgcaacgcattgcagaacagccaagccagcgcgatcacaaacgcggcgaagaacgcacacgcccataccgtcttcgatccgccgaacaccgatggcggcacgctgaactccgaccacgccagcaggtccagaaacatcgcgttgcccatcagcgacaggtaataccagtgcgggaaccgcacgcgcgcgaccagccgtgcgcggtcaccgtcaatcaggcgcagggcctcctccgccgatgaatccggcaggaacgaccattcgtcatccatgtgtgatcatctcgattcaacatcgtcacagcagaacttctttccaacacggaaaacagtactactttccaccatggaaacaagtcggcgtgtcaaactcgttcatcatgccgaacgcgtccattaccacgcatcgccacgacgcgccagacctgacgacacgtatcgaacgaatccatcacgataatgtccatgttggcgcatagcgtcggcactgtaatgcaggggaactcgcatgtggttcgcgagttgagaaaggcctaagcctgacccttagaacctgttggttaagaccatcgtagggagcagtaatgagcagtagtgcatcatcgtttaccggttcgtccagcgactgtaccaccggcacaccggtttcatccgattcaccgattcgcgagaacatcgcagccgccgtgcgccgcgtacgcgagacgacgccgctggcccagtcgttcaccaatttcgtgaccatcaatctggtggccaacgcgcagctggcagccggcggcactgcggccatgagcttcctgccggacgacgtgatcgaaaccgcgaaaatcgcgggcgccaactacatcaatgtgggcacgctgctgccgttctataaggacgcgctgcctgaaatcgcgcagcgactcaattatttggacaagccgtgggtgctcgacccggtggccgcaggcatcgggcgtacccgcacctttattcttcaggccttcaaggccgctccccctactgtgattcgtgcaaacgcttccgaggtgatcgcgctggcgaatatgtgggggctcaacaccgaatccgtgggggacgcttccgaacaccgccccgccggagtggaatccgtcgatgacgtggattccgcaaccggtgcggcggtggcacttgcccggtatctgaccgagcagcacgccaagcattcgtctcacgatgcttccatcccctgtgcagtggccgtgtccggcatcgccgacctggtgaccgacggcgaaaccgtgtaccggctgccgggcggcagctcgatgatgaccaaaatcatcggtgcaggctgctcgctgggcggcgtggtcgccacgtatctggcggtgtccgatccgttgaccgctgcgttgtccgcgtcgctgctgtacaaccgcgcgggcgaggtggccgatacgacttcgcatgggccgggctcgttccaggtcgcgttccttgacgcgctgtggaatgtgaccgccgagcaagtggcggaatctgagattttggtgcagtagtgtactgcccccgctggcgggggctgccggcaaagccggctgggggcggttcctggagttaccatcctccgccgcttcgtggcacctcccgccagcaggaggaaaacactcgataccacatcaaccccaattcacttttctaataaaacttccacaagaaacaacaaaggtaggaataataatgagtaatgaatacccatacgcctccatgcgcgacagttttgacctgtccgcgtacttcgtggtgggccccgacgactgcaaaggccgtccgctgaccgacgtggtggatcaggccctgcgcggcggcgcgaccttcatccagctgcgtgccaagaaggccgacgcttccgagctgaccgacatggcccgcgacatcgcgcaaatcatcgaggacaacgaaaagtccgattccgtggcctttgtaatcgacgaccgtgccgacgtagtgtggcaggcccgccgcaagggcatcaaggtggacggcgtgcacatcggccagaccgacatggagccgcgcgaaacccgcgccctgctcggcgacgaggccatcgtgggcctgtccgccgaaaccgagagcctggtccagctcatcaatgagctgcccgacggctgcatcgactacatcggtgccggcccgctgcacgtctccaccaccaaacccgaggcttccgtgggcggcaacgacggctccggcaagacgctggacgcggctcagatcaacaccatctgcgttgccagcgaattcccggtggtcgtgggcggcggcgtgaccgcagccgacatggccatgctcgccggcaccaaggccgccggctggttcgcggtctccgccatcgccggtgccgagaacccggaagaagccacgcgcgccatggtcgaaggctggaaagccgtccgcggcgacaagaagcacggctacgctccgcgcattgtggcccacgcccccgccgccgacacccaggccgcccaggaaggcaccgccgcagccggcagcgaagacaccgaaaagaagttcaccaacgccaagcaggccaaggacgcgcagaagctcgccaagcagcagcgcgtggacatcgccgcacgcggctccgagcagcgcgacaaggcgcacatccgcaagaccaagaccgtgccgttcacctaccagtacggctcctacgatctggaagtgccgtacaccgaaatcaagctgtccgatacccccggtgtgggcccgaacccaccgttccacgattacagcaccgaagggcccaagtgcgatccgaaggaaggcttgaagcccctgcgtctcgactggattcgtgaccgtggcgacatcgaggattacgagggccgccgccgcaaccttgaggacgacggcaagcgcgccatcaagcgcggccgcgccaccaaggaatggcgtggtcgcaagcaccagccgatgcgcgccaaggaccacccgatcacccagatgtggtacgcccgccacggcatcatcaccccggaaatgcagtacgtggccacccgcgagaattgcgatgtggagctcgtgcgctccgagctggccgccggccgcgcggtgatgccctgcaacatcaaccaccccgaagccgagccgatgattatcggttccgccttcctgaccaagctcaacgccaacatgggcaactcggccgtcacctcctccatcgacgaggaagtggagaagctgacgtgggccaccaagtggggcgccgacactgtgatggatctgtccaccggtaacgacatccacaccacccgtgagtggattctgcgcaactcccccgtgccgatcggcaccgtgccgatgtaccaggcccttgaaaaggtcgaggacgatgcttccaagctgagctgggagctgttccgcgacaccgtgatcgaacagtgcgagcagggtgtggattacatgaccatccacgccggtgtgctgctgcgttacgtgccgctgaccgccaaccgtgtgaccggcatcgtctcccgcggtggttccatcatggccgactggtgcctacgccaccaccaggagagcttcctgtacacgcacttcgacgagctgtgcgacatcttcgccaagtacgacgtggcgttctctctgggcgatggcctgcgccccggctccctggccgacgcgaacgacgccgcgcagctttccgagctcatgactctgggcgagctgaccgagcgcgcctgggccaaggacgtgcaagtgatgatcgagggcccgggccacgtgccgttcgataccgtgcgcatgaacatcgagctggagaaggccgtgtgccacaacgccccgttctacaccctgggaccactgaccaccgataccgctccgggttacgaccacatcacctccgccatcggcgccaccgagatcggtcgttacggcaccgctatgctgtgctacgtgaccccgaaggaacacctcggcctgccgaacaaggatgatgtgaagcagggcgtgatcgcctacaagatcgcctgccacgccgcagacatcgccaagcaccacccgcacgcgcaggaccgtgacaatgcgatttccaaggctcgcttcgagttccgttggctcgaccagttcaatctgtcctacgatccggacaccgccatcgccttccacgatgacaccctgcccgccgagccggccaagatggcgcacttctgctcgatgtgcggcccgaagttctgttcgatggccatctcccagaacattcgcaaggccttcggtggcgaagccgcccagcagcagatcgtgaaagaagccgcggccggcgtgagtgccgatgcacttaccaccgctgccaaggctgctgccgatagcggcgtggtgtccgccaacgtgctcagccccgaagaaatcctcgccggcatggatgcgatgagcgaaaagtacaccgcccaaggcggcaagctctactccaccgcccaggagtaaacctctctggctcccctctctgaggggagccaattattatgcccggtggtgtcttaattcgggacgacgctcgactcgctcgaaggcggtgacgaggtcggcagcacggatcgcgccgcggcggtccttggcggccaccagagcggcctcggtccagatggcgcacacttcggcgccgctccagccttcggtccgctgtgcgatatccgccaacggcagttcgccctcgattgacagcgaacgggcctgcacctgcaaaatacccaaacggtcgcgctcggacggcatcgggaaaggaatctgccagtcgaaacggcccggacgcaacaaagcaggatccacgtcctcaatacgattggtcgcagcgaccaccacaacattgcccttggactcgaaaccatccatcaacgtcagcaactgcgccaccaagcgcttgccgacgccattggtatcgttctcgcgcgaggacgcaatcgaatcgatctcatcaaagaagatgatggcgcgcttgtccgcctgcgcggcggcgaaaatcatgcgcagcgtttcctcactatcgcccacatacttgctcacgatggtcgggccggacaccagatagaactgcgcgtccgccacattggcgatgatgcgggccagatgcgttttgccggtgcccggagcaccggtgaagatcacgcccttgatgggcttggcaccgatcgcacgcatctgcgcactgttacccagctgcgtttcgataagctccttggcgcgcgtgatcacctgctcataaccgccgaacgaatcgaaggtaagcgacggatcgctgcccggcgtgatgcggtactgcttgatgtcgtcatcgtgatcggattcacctgggcggatggccgtgggccacagcactcgttcgatgccgaacaggtcggtgaactgcacggtgttgccgggcatgattgaagtcgggtaatcgccttcaagcagttcgaggccgtcggaagtctccaggaccacgccttcgttgagcgcacggcgcacgatgcccacacggggcttcaacggccacacatcatgcggcactttgcgatagaaatccgtgccgacgagcaacacgtcgcccacatcgaacacctcctgacgcggaaatgtgagctgtgtggtgtgcccattaggcattacgccaaaatatgcggtgcgttcatcgtcaaaaccggtgatgcgcaccaagacgccgtcacggcgcagtacatcgttatcagccatgtcccctcccgaacatttcatgaatcaatcgcaatcagcaaaccctccccatctcaccacaggagcggcaaaacatcaaggaaaaccgctccgaaaaacatcatgggccccacttagaatgaacactatggcacaaattgcaacatctacacttcccgctgttctcgcgatctccggctccgactcgtccggcggtgccggcatgcaggccgatctgaagaccatgctggcttgcggcgtgttcggcatgagcgccatcactgcgctcaccgcacagaacaccaccggcgtacgttccattcaggacaccaaaccggacattctcgccgaccagatcaacatggtgtttgaggatattccgccggtcgcggtgaaaatcggcatggtgtctgccactgacatcatcgacgtcattgctgaacgactcaccttccatcacgccacgaacatcgtgctcgacccggttatggtggccacttccggtgccaagctcatcagtgacgatgccattgcggccttaaccggcaagctgttcccgatggctacggtcgtgactccgaatattcccgaggccgaagtgctgaccgatacgctgattcgcgatcaggaggatatggaggccgccgcccaccgcatcgtggagcgttacggctgtgccgcgctggtcaagggtggtcatggcaccgaggatgccaacgatgtgcttgccgagacggatggaaccgtgacctggtttgatggcgcgcgtatcaataatccgaacacgcacggcaccggatgcacgctgagctccgccatcgcctcgtatctggcgcttggcgacacgttgcccaaggccatcaagcatgcgaagaagtatctgaccggtgcgctgaaggcccagctgaatctcggccacggctccggcccgatggatcatttctggaagtatcgctgacataagtgtggttgttaagctccccttgccaggggagattaacactactgaaaaaggagaatcatggttcttgaccgtaatgccgttactcaggaagtgccgatcgacccggaaaccggcaaaccgtacctcaacaccgtggcagccatccaggtgtcggccaatggcgtgggctccgaggtttcaccatacgtggctcaggccgtcgaagtgattcgcgaatccgccctgccgcaggaaaccaacgccctgttcaccaacgtggaaggcaatctggacgacgtgctcaaggtggccggtgaggccgccaagaagctcgccgagcagggctaccgcacttctctggtgctgcacatggatatccgtcccggcttcaccggccagctgaccgaaaagcccaagctggtggacaagatcctcgccgacaagcaggcgaagtagcaaagcatcgcttccaccagcaagggcatgctttgttattacacgtttcatggggcggtagctcacccatggggcggtaaatatctcatggggcggtaaaaccctcatggggcggtaggcgaaaacggctctattctgcggaaaggcaaaatccgctaaccgccccatgggccaaataccgccccatgagtgttttaccgccccatgggaatcacggttctaccttctctcaacggggtaagagcgtaagtggggcatatataggagcgttacaaactctgttatcgttcacaatgtgaccgcaacgcggcgtgccacaaaatcgaacctatagttaagccccatgtagtgagctatctcacaacgattggctcgctacgtgggattcaagacttggactgcaaacgtcgttcatcccacacaatgggagggcgaacggaacacgcagtccaatcaagagttcgctcgccgcaacaccattgagcagttgcacgcgggcaggtttgcaagaagagggctcaaatatgactgctgctgaacagcagatttccggcaatcccgcggctatggaaaacgcacaagcacgtaccaccgtgacggatcaagccaaggttcaggatattatctcgcgcatggatcgcgcacatgaaaccccgatgttccatcgcatcgtgacgctggtcgccgctggcatgctgatggacagcatcgacgtatatattggcagcgccgtcgcctccagcacgttggctacccactggtccaccgttgcgcaaaattccacctttatgtccgcgggcttcctgggtctgctggtcggttcgctgctggccggcttcgtcggtgacctgaagggccgccgcgtggcttaccaaatcaacctgctgctgtttggcggcttcaccttcctcggcgcattcgccccgaacatggccgtgctgtccctgtgccgtctgggtgccggcctgggcctcggcgctgaaatcgtcaccggcttcgccatggtcaacgagttcgcaccgatgaaccgccgtggccactggtgcgcgattgtctcgctcgtggccaactgcggtgtgccaatcgctatgctgctgtgtgcatggatcatcccccgctggtcctggcgtccgctgttcgtggccatcggcctagtggccgccatcatctggtggctgcgccgcgacatccccgaatccccgcgttggctcgccgtgcgcggccgttacgatgaggccgacgccatcgtcaagcagcttgaggccaacggttccgaaccgatcgacgcagccgccaaggccgacaccagcgacacccgcaacgccggaggccgttcgctcggcatctgcctgcttgtggctgtggttgctgtggccgccacgaacgtgtgctcctacgccttcacttcttgggttccgacgattctggtcaagcgtggtattaacctgtccagctcgctgctcacctccacggtgatgatgctcggcgccccggtcggctgcctgattggctctctgcttatcgaccgtatcggccgcaagcgcacgattgtgccggccttcctgttcactggcgtgttcggtttgatgtatgccttccagacctctaccgtgagcgcaattatcgttggcttcctgctcatgatgtgcctgtacgtgcttatggcttccgtggtggctgtgtacgctccggaactgttcgccaccaaggttcgcttccgttgcgtcggcttcgcgaacgccgtggccaagctgctcaacgtgttgatgccgatggtggtgggctggatgcttacctcgcttggtaccacgtccatctttgtggccatcagcgcgattgctattgcatcgatgctgattgtcggcttctttggcgcggagactgcgcagaagtcggttgggtgatcggtttcctcacagtggaataactgctgataatgtccattcggcgtcttgcgcggtgacatgcagggcgccgttttgttgttctagtaattgtcggtaacggttgaggccggtgccggtggataggtctgcgtctccagcggacaatcagcgtctgtgatgtcacatgcaatgccaggagcggtatcaacggtcgaatcatgcggagtcactgcactgtgcgccgcttctcccctgccttcaatcacatcaatgacttgatgcgtgcggtccaatgcgcccatagacatatccgtaaccagcacgtcaggccgcttggtggggctcaggcatcggctgatggccacggcacccaaatcgcaggtccatatcacggcaaaatcgctggacatgcgctcgattagcgtgccgaacactttcagcgcatacgggtcattgtccacaatgccgatgagtatgttgcggttgcgcacttctcccattacattcaccccttcagtgtgcccgacgccgaactgctccgtcctgacatgtcatggtcactatgacaactatcattccacatttcctgcgtgatttacgatggaatcatcatcaatccttgacaaggcggtaaaggaggacggcaatgaaccgtgcacaagcactcagcaagctcaacaggagcgatatgcgcaatgccgccgccgagcgcgggatgcaacgactgttcacatggaaccgcgcgcattggattggcatggttgtactgatagcggtgttgctgctactgcagtggagctcatcaatgtatctcatgcccgacgaggttcttgacagggctgccaaaaacctgttcgtatggttccccggtatggttctgcactggccattggtgttgggaatcaccaacttgatactcggttcgacacgatccggcagtctgtctttcccgttggcgagcgcaatcatcggaccactggcattcggctggaccaatcttcgcttacggccggggttcccataccgttcctgggctcaagggaaagccgcaatataatgaaaacagcgatttcatgcaatgatgcacgagccgatccaagcaaaggggccaaccatgagcgagcaactgatggaacagtaccggttgcgcggacaacgcaaacgccgtaacgcttgtatcgccgccatcgtgacggtagtgcttgtccttgccgtcgccggcggcgtatggtggacggccggcgatggcagcgcattggttcgcaatatgttcaagccgaaggccacgcctgccacgcagccggtagtcaacagcaccgcagccttcgcctaccgcaccgcaccggaattcctggcgatggaagccggcgaccgaggcaccggcaatgtgaactactcccctgcttcgatgtggatggcgttggccatcgccgcgcaaggcgccaatggcacgacccgctcgcaactgaatgaactgctgggctccggttcgctgaccgatagcgactaccaatcgctgctgagttcgatcaacgggcaatattcaggggcgaaatccgagatgagcgccgcgaactcgctgtggattgatgacggctactctcttgccagcgattaccaatccaccgtcaagaagatgttcgaggccgaagtcaccacgttaccgttcggcaatcaggccgccgcaaagatgtccgattggatcgccaagcatacgaatggttcgctcaagccgaagatcacgctgcgtgaccgtgaagtcctgtccatcatcaacaccgtctatgcggatggccgttggaaggatccgttcgaagagcagtccaccggcaacggcaccttccacggcgaagccggagatgctcaggtgccgatgatgcaccggaccttcagccaaatggcttacggacatgatgagtacaacacttggcagcgggtggagattccgttcgacaacggcggcaatctgtccatcgtgctgccggccgaagggcatttcgacgagttggccggcgatgccgagaagctcagttgggcgttcggtacatgcccgacggcttcccttggcgagggcgcaatgggttgcgccgcggacagtatgcccggatggggcgtctccgtcaactcggtcatggtgaacgtcacgctaccgcgattcaccatcgacagcatgttcgactcggaagccaccatcaaggcattcgaaaaactgggggtgaccgatgcgttcagtgcaggcgacgccgacttcaccaagatgatcgacaccggttcgcacggcgagaacctgtatatcggctcgattctgcaaggcacgcgcatcgaggtgaacgaagccggcgccaaggccatgtccttcaccaaggtcggcgcagactccgttagcgcgccggtggacaacgtcgagttcacggtggatcgcccatttctgtattcgtacgtcaccccggacggcataccattattcatcggtgcggtgcgcaacctcggcggagtcggtggagaaaactgatactttcctggcagtccgtcaattagggtgtatcgtttgacgcatggttacgatgaaggaaatcgcgaacaaggcgggggtttccgtctctacggtatcgctggtgctcaacggacgcgacgaggggcgcgtaaagtccaaaattgcggacaatgtacgcgccatcgccaccaagctcggctaccagtcgaatccgctggccagttcgctgcgtacaggcaggacgcacatcctcggtttcatcagtgaggaggtggccaccaccccgtacgccggcggtatgattctgggcgcgcagaccgctgcaagccagttcggctatatgctcatcaccgtgagcaccgacggcgagaacagcgagagcgaggaaatcgccgcactcaagcgatacggcaccgacggctttctgtacgccaagatgtcgaaccgcatcacccatgtgccttcctcgctggccaagacgccactggtgttggtggatgccaccgactcgcttggcaaagtcccgagcgtggaaccggacgagttccaaatcggctacgacgccaccaccagattggttaaggccggatgcgcacgtatcgcctatgtgggttgcttggagccgatgattgcgcaggacgatcgtttggaaggctatcaggcggcgctcagggacgcaggcctcgactatgacgatcatctggtcgtcaatgtgctcaacaacgggccggcactgaccgcagtcagcgatttgttcgacgccgagcatccggacggattcttctgcttcaacgatgcccgcgcctggtatgtgtacgaatgcgccgcacgccgaggactcacggtcggcaaggacatctccgtggtcggcgtggacaaccatcgcgtgttcgccgaaacgctggaaccgatgctcaccactgtggaactgccgcatttcgagatgggctactgggccgtggccaagctggtgtcgattatcgaaggacgctcgatggacgacgtctcatggccagcgaccaccgctcccctgccgccgatcgacgcgccgattccggcgaagatccactgcacgctgatcgaaaaggcctcggtgaagtaaccgagtcccacacgatttctcaaggcctccgttcagcacggaggccttttgcgtgtcgaacggatacgacacgccgatttacgtcaatcgattgacgtaaatcgattgacgtcgcataataattactacgcaacaacttctacaaaggcacggccgcccgagcagaagcgttacataaccaataaccaaccaagtagtaatcaaaggatgattatggcaagtgcaaccaaatctgcatggaagaatccttcctatctgcagagctctttcggcatcttcatgttcttctgctcctggggcatctggtggtccttcttccagcgctggctcatctcaggcgttggattgaccaatgctgaagtcggcaccatctactccatcaactcgctggccaccctggtcatcatgtttgtgtacggcgtgattcaggatcagctcggcatcaagcgcaagctcgtcatcgtagtctcggtaatcgccgcctgcgttggcccattcgtccaattcgtttacgccccgatgatcctcgccggtggcaccacccgctggatcggcgcactcatcggctccatcgttctgtctgccggcttcatgtccggctgctccctgttcgaggccgtcaccgaacgctactcccgtaaattcggtttcgaatatggccagtcccgtgcttggggctccttcggttacgccatcgtggcgctgtgcgccggcttcctgttcaacatcaacccgctgatcaacttctgggtcggctccgcattcggccttggcatgctcctcgtgtacgccttctgggtcccggccgagcagaaggaagagctcaagaaggaaaccgacccgaacgcagcccccaccaacccgtccctcaaggaaatggtcgccgttctcaagatgccgaccctgtgggtgctcatcgtcttcatgctgctgaccaacaccttctacaccgtgttcgatcagcagatgttcccgacctactacgccaacctcttccccactgaagaaatcggcaacgccacctacggcaccctgaacggtttccaggtcttccttgagtccgcaatgatgggcgtggtcccgatcatcatgaagaagatcggcgtgcgcaacgctctgctgctcggcgctaccgtgatgttcctgcgcatcggcttgtgcggcgtgttccacgacccgatcaccatctccatcgtcaagctgttccactccatcgaagtgccgctgttctgcctgccggcattccgctacttcactctgcacttcgacaccaagctctctgccacgctgtacatggtgggcttccagatcgcttcccaagtgggtcaggtcatcttctcgacccctctgggtgccttccacgacaagatggctcagattctgccgaacaacgacatgggatcccgcgtgaccttctgggtcatctctgccatcgtgctgtgcgcactgatttacggcttcttcgtcatcaagcatgatgatcaggaagtcggcggcgacccgttctacaccgacaagcagctgcgtcagatggaagcggcccaggcctgaaaggacagccatgactgacttcactcccgaaacccctgttctcacccccatccgcgaccatgccgctgaactggcaaaagccgaagccggcgtggctgagatggccgccaagcgcaacaaccgctggtacccgaagtatcacatcgcctccaacggtggctggatcaacgacccgaacggcctgtgcttctacaagggccgttggcacgtgttctaccagctgcacccctacggcacccagtggggtccgatgcactggggccacgtctcctccaccgacatgctcaactggaagcgcgagcccatcatgttcgcaccgtctctagagcaggagaaggacggcgtgttctccggttctgccgtcatcgacgacaacggagaccttcgcttctactacaccggccaccgttgggccaacggccacgacaacaccggcggcgactggcaggtgcagatgaccgcgctgccggacaatgacgagctcacctccgccaccaagcagggcatgatcatcgactgcccgaccgacaaggtcgaccaccactaccgcgacccgaaggtctggaagaccggcgacacctggtacatgaccttcggtgtctcctctgcggacaagcgcggccagatgtggctgttctcctccaaggacatggtccgctgggaatacgagcgcgtgctcttccagcacccggatccggatgtgttcatgctcgaatgccccgacttcttccccatcaaagacaaggacggcaacgagaagtgggtcattggcttctccgccatggggtccaagcccagcggcttcatgaaccgcaacgtcagcaacgccggctacatgatcggcacgtgggagccgggcggcgaattcaagccggaaaccgagttccgcctgtgggattgcggccacaactactacgccccgcagtccttcaatgtggacggccgtcagatcgtctatggctggatgagcccgttcgtgcagccgattcccatggaggatgacggctggtgtggccagctcaccctgccgcgcgagatcacccttggcgatgacggcgacgtggtcaccgcgccggtcgccgaaatggaaggcctgcgcgaggataccctcgaccatggttcgatcacactcgacatggatggcgagcagatcatcgccgacgacgccgaggccgtggaaatcgaaatgaccatcgacttggctgcctccactgccgagcgtgcgggtctgaagattcacgccactgaggacggtgcctacacctacgtggcttatgacggccagatcggccgcgtggtggtggatcgtcaggccatggccaacggcgatcgcggctaccgcgccgccccactgaccgacgccgaactggcctccggcaagctggacctgcgcgtgttcgtggatcgcggctccgtggaggtctacgtcaacggtggccaccaagtgctgagctcctactcctacgcctccgaaggcccgcgcgccatcaagctcgtcgccgagtccggtagtctcaaggtggattccctgaagctccaccacatgaagtccatcggactggagtagctctttcacctccctctgacgagggaggtttttttgtgcgccctgtcgttcgccttcgcctatactgatggacggcatataacacaatccatcacacgaccggcaggcgcgcaggctcctcaccttactgttccacgccccggccgcaagcgccaccagcaaaccggactggcgcggaaagcaaggtgacatcccatgtccatcgccaagcgcctcaagcgccgcatgcccaccgtcatcgccgtcatcgtattgctggcagtctgggaaacgtgggtggatctaggacatgtctcccccacgatgatctccgcgccaagcgagattttcgccgccaccatcgaaacatggaacacgctcggcccggccgcggcaatcaccggctatgagggcgtggtcggcttcctgtttgccgtgttcttcggcattatgatcggcattgcactgtactgctcgcacacgttcaacgcggcgttctatccgctgcttgccgccgcacaaaccatgccgctgatttccatcgccccgttgttcctgatttggttcggttttgagatttccggcaaaatcgtaatcgtggcggtattcggcctcttccccatcgccgtgcagactgtgcgcggactagaagcagtgccccagttctattccgacgtcgcattgacctgcggcgcgaccccggtctggacgctctggcacgtgaagctgcgcgttgccgcacgtcagatctatggcggtatccgagtatctgccgcatacatcttcgccacggcatctaccgctgaataccttggcgcacgcaagggcctcggcatctggctgcaggctgcctacaattcattccgcacgccgctgatcttctccgccaccatcgtcattatcctgatgacatgcgtactgatgctggcggtaaacgccagcgagcgcatcctgctcggcccggccggcgatgacgaagaccccgacgcggaccagtagttcttttttaccgtcaaaggcacgagccggcggccaggaccgactgaacgaagcggcttctcatgaggtctccaaccctgtctctataatggaacagctttaccagcgtgtggcaaaccggctttcccgagctttcatagggaatgtcgggggcgctggtcgaacggaaatcaaggccctccatatcgttttctgccgacttccgttcgaagcaatcccagagaacgatagagagacaacgaattagggaaccatcattatgaagaaaagccttgtatccaaggccgctgccctcgtgggcgcccttgccatgactttcggtttcgccgcatgtggccagaccaacaccgccgactcctccaactccaacacctccgacctcaagaaggtcactttcatgctttcctgggcacccgataccaaccacatcggcgtgtacgtggccaagaacaagggctacttcaaggacgccggccttgacgtggatatcgtggccgtggcccaggccggtgccgaacaggccgtgaacaacggtgtggccgacttcgccctgtccaacctgaccaacgtgggcgtctacacgctgaagggcgctcacatcaagcaggtgctgcaggtgcagcagaagccgagcgccatttggtgcgcactggcgtccaacaccgccatcaagtcccctaaggatttggatggcaagaccttcgccaccttcggctccaacgagtccgatgccgtggtgcgccgcatgatccaaaccgatggcggcaagggcgaattcgacaaggtgaccgtcggcacctccaccttccagaccatggaatccggcaaggccgatttcggcggcttctacgccacgtgggaaggcgtgcaagccgacatgtacggcccgaagctcaactgcttcaccgagcctgactatggcgtgcccggcaacgccgacaccatcggcatcatcaccaatgacaagaccatcaagaacaatcccgacctggtcaagaagttcactcaggccactcaaaagggttacgagtacgcgtacgccaacccggatgacgccgcgcagattctcgtggacgaagcccctgacgccaacctcaagcccgaattcgtcaagaagagcatgcaggttatcgtcgacggccagtactggggcgatccggccaagatcaaggacggctctttcgtgctcggcaccaacgacttcaagggcgctcaggaatacttcgacttcctggctgaagaagacgcatacaccgacagtcatgacaagataattcatgaggccccgcaggccaaggaccttgccaccgacgaattcatcggcaagtaatttccgatattccgagtttgaatctacgcaaaaatgcgtccttcccatgaggaaaggacgcatttttgcgtatcagccgataaggttattcatagcggatcacgctaacaaggagacgattctatggtccaatgtcctgaccgtattattgccagcatggatacgggtgttgatgatgcgttggcgttggcgtatttgttggggtcggcggatgagtgcgagttgggtggcgtgattgccggttatggcaatgtggatgcggacacggcttatgccaatacttgcgcggtgcttgatttgtttggtcgggcggatattccagtgtttttagggtctgagcatccttcttgggctgatgcgtttattcctgatgcagggtgtgcccagttccatggggatgatggactggggaatactcggctggcagggtccggggctctggctgatggagcttgtgtgcctggtgatgatatgtctgtggatgtgcccgatgaggttgtttctgttggcgggtatttggcgggggatgttcatgctcatccggcgttgggtgcttgttctcgtgtgaaccgctctcggtcggtgggccacccccagtcggctatgccgacagctctcgccagcgggggcaaaaggagatgctccgttgatgctgcggatgggattgagtatctgattgagcaggttcgcgagtttggccgagacgttaccgtgctggctaccgggccgttgacggatgtggatgcggctattactcgagcaccggatattgcatcgaaactcaggctggtgatgatgggcggtacgcttacccaacccggtaattgttgggatgcggtagctgagacgaatatcatccaagaccctgaggccgcgaatcgtgtatttcattccggcgcagacatcacactggtgggacttgatgtgactcaccagtgtttgctaccgcaatcggcggccgaccggtggcgtgcgacggggaccaagcgcgggcggttcttggctgatctcgcggacttttccatcaaggcaaatttggaagccgaccccgcactgttctctggcggcatgccgttgcatgatccgttggcggcggcggttgcacttgattcttcactggtcgattgttttgatcttgcgttgcgcgcggagaccaataccggtgatttcaatggagtacgaggccggaccaccggagacccggttgggctggtgaatcattccatgccgcatgtgcatgtggcacttggtgtggattcgggacgctttttggatgagtttgtagagaggatggctgaggtgtgccggtaactcccctcagtccgctacacgggcagctcgaccgcaattacggacaagctgccgctcgcattcttctggctcgactctcgtctcgacttcgcctacaaacagtccaccgggcgtttgctttacggctcagcccgtcagagggggcctaacaaggactatttcacacccccagcaattaaggaccggcttcgccggactcatcattacctggtcatgtcctatcggcctcggccaggcggcgtgaacgaacagtccaccggactgttctttatttcacgccgccaaatcggcgatcgcggtggatgtaatggtcgatggagcgccatagcacgtcacggccgcagtccgggaagagttcgggcacgaagtcgagctcggcgtaggcggcctcccacggcaggaagttggaggtgcgctgttcgccggaagtacggatcaccaagtcgcaatcgggaatgtccggattgtacagatggtcggcaatcatcttctcagtcacacggtcgccggaaatcttgccatcgcgcacttcgcgagcgatggcggcgcaggcgtcggcgatttcagcacggccaccatagttgatgcagaacaccacatcgatgaccttgttgttcttggtgcgctcctcggcggcttcaagctcgtcgatcaccgacttccacagcttggggcgacggccggaccagcgcacgcgcacaccccactcgtccatctgttccacacgacggtggatgatttcacgcgagaaacccatgaggaagcgcacttcctgtggcgagcgcttccagttttcagtggagaacgtgtacaggctcaaataccgtacaccggcttcgatggcaccggcgatagtgtcgaacaccaccggttcggcggcctgatggccattggtgcggaccatgccgcgctgcttggcccaacgaccattaccgtccataatcacaccgatatggcggggtaccttgttcttggggaagtcgggaatacgagcggggtcgctgaacggagctgcgggaatgtccaacgacgtgtaatcaacgttctcaaaagccatactcatgaatctatcaagcgcagcgaacgaatcgggcgttcgaggtaatactccccccaatcttcaaccaactcctgcacaacccgctccacaggcgcggcatcaagcaccgaccaatcgccacgaatcagtgcatcgaactggtttaacacgaacggtgcgatacggcgcgcatcggtagtgtggtcggcttcgcacatcacaccgccggacgcgatggacaggtacgccggctccgccttgccgcataccacgcaagtgcccaatcgtggcgtccaaccggccaaggccaaggcgcgcatcacataggagtcgcctatggcttgcggggcgtgggattgtttggcgagcgcgttcaacgcgccgatgagcagccgatattggttcggcagctgctcatgttcggtgctggcgattttatcgatagtctcaacgatgacgttggcggcctcatacgccgcataatccgccgcgatcggagcaccataagcggcgaccgcttcagcttgggagaccacgtcaagcgagcggccttcagcgataagcacatcgactcgcatgaacggctcgagcctggcaccaaagcgtgatttggtgcgacgtacgcctttggcgaccgcccgaatcttgccatgcccacgcgtcaggatggtgatgatacgatcagcctcgcccagtttggaggtgcgcaacaccacaccttcgtctcggtacagcgacatctcatctcctttccccgcgacgcctggcagactctactcaatgaagtagtcagtaaataaacagaccccagaaggcgaacaccaacagtatgtacagcatggtgaaggccaccagccagaacaggattcggcccagacgggtggaggccagtaccgggtcagcaccggtgacgatgtctcgaacggattcgcgacgagggggtatctgaatcaggccgcggacggaagcgacttctatcagatgcataaagacgcgggaccaagcccatagcaccagcacggacaccacttggatgaccggccagctccaatacatgacacccggcgtctcggtaggtgcgctaccccatgcaagtttgaccacgcccatgatcacctgtccgagtccggcgaagaagatgagcaatgtggcaagagtggtgagggtcaaagtcagcagcgcattgccgaaaccatgtgcgaaaccgagtaccacaggccgttccggtatcagcatgcccgcacgtttggcctcgcgcttctctcgccgccatcgggcatccgccgcgattttgcgacccagcgccaccagtgccagcacgatggatgcgagcagcagtagtaccaccgtgacgtgcagaatcacaccataaatggtgccgacgcgtcttgccttcaaagcgcccggcagaccgattgattggtacagattggtgccggccaccttttcactggtctgcgtgagtccggcggaagtgccgacggcccagtcgatgagatcgtccacataggcgtccgcaaacggggtgcccgcttcggactcatctcccaagcgcagcacatggttggcgaccgggtagctgcgcacggtcacattccagttatcggctttgtgggcgttgtagagaatcgcacgcacaccgtcgacctgcgccgtcatcacgtctttcgaaccgtaagccacataggtgggtacggcgtaggcggcgggtttgagtgtggcgaggtcgaaattgttcagtccgaacaggccggtgtccgcgctgaacacacgttggacgatggattgatagccttcgttcgcgccaacaagggtgaagtcctgggtgacgaaaaatcccagtgattggcgtgggctgaacaccatcgggctcaggagaatctggaaagcgacgtccggatcgtcctcgagcagatacgaggagatccatgtcgattcggaggtggcatagatgccgaccttggccgcgtccacatcgctttggtctcgcaggtattcgatgacctgatcataagccttggctgaggccggataatcgcggttgatgtcggtggtgttccagacgggtttgtcgagcactgcggtcacaaagccggccgaagccataccggaggccacgtcgccaaaggagttgtcacaggtgccgtatccggcaccgtgcatgaacaccacgccggggcgcttgcctgatgcgttctgaggttcccgaatcaataccttgatagcttggacgccgtccgcattggccttaccccgagcaccggactccttggtcagattgccgtcgctggtcatgttcagcgtgatgtatcgctcggtgacctcatacgtgccttttgccggcagcgtttctccggacgggttatcgaaggtgacttcggtatcgtcggtgagcgtggccatcgactggccggtgggttcgatgttccaaggcaccgtggtcagattggaaatggagaccagcacgccaatcaggataatgaagatgggcaggctgaccatcagccggtgggtgctggtccacggcttggatcgaacagtcaggcgatgctcttcttcttgcggcacgtgcgctattgtaatctgaccgcgatatttatgccgagggcctattcggccgaatcagtgaccggggtgctggattgggaccacgaccgggccggtggaattgacggggacttgaccgtcggcctccatttgggcggcgatatcgttcgctatggtgagcagcgtgtcgacgatctggtcttcgggcacggtcttgatgaccttgcccttgatgaagatctggcccttgccattgccggaggccacgccgaggtcggcttcgcgtgcctcgcccggaccgttgacgatgcagcccatgacggctacacggatcggcgcggtcacgtccttcaggccttcggtgacggcggaggcgagctggatcacatccacttgggcgcggccgcagctcgggcaggagatgatgtcgaacttgcgggggcgcaatcccatgtattccaagagtttgcaacccaccttgacctcttcggccggcggcgcggagagagacacgcgaatcgtgtcgccaatgccctcggccaagagcgcaccgaacgccaggcaggatttgatggtgccttgccaagcagggccggcctcggtgacgccgaggtgcagcggccaatcgcccttggaagcgagcagtcggtacgtttcgaccatggtgatgacgtcatggtgtttgacggagatcttgaaatcgtggaagccgacgtcctcgaacatgtgcgcttccttcaaggcagaggccaccaatgcttccggagtcgggccaccgtatttggcgtagagttccttgtccagcgagccggcgttcacaccgatacgcagcgagatgcccgcgtcggtggcggccttgcagatgtccgggccgacttcgtcgaacttacggatgttgccggggttcacgcgcacggccgcgcagccggcgtcgatggcctggaacacgtatttggactggaagtggatatcggcgatgaccggaatcggcgatttgcggcagatttccggcagtgcgtcggcatcgtcctgactcggcacggccacgcgcacgatgtcgcagccggcggcggtcagttcggcgatctgctgcaacgtggcaggtacgttggccgtgagcgtgttggtcatcgactgcacggagatgggcgcgcccccgcccaccggcaccgggcccaccatgatgcggcgggacttgcggcgcgggtgcaagggcgattcgctggtcaggtcgaccggatcaccggttttgcggaacggcttttcgatgggattttccgtattcaaggtattcatcattgcttgtttatcaggtcgtcggcgcgtcggcgggcttcaagctcaagctggttcatttcctccacgtccgtgaacagcgggttaccacgaagctcggcgtccatctggtccagcacggctttgaccgtgtccacgatgccgaggtatggcagacgatgctcgaggaaggcatgcacggcctgttcattggctgcattgagcaccgccgtatgcttctcggaggcggccaggcagtggcgggccagttgcacggcagggaacgcctcatcgtccaacggttcaaaggtccaagttgcggcttgcgtccagtcgcacgcggcggccacattggtcatgcggtccggcgcggacaggcccagcgcgatgggcagacgcatgtctgggggcgaagcttggcaaatcgtggcgccatccacaaattcgaccatggaatggacgatggactgcgggtgcacggtcacgtcgatgcgttcaggcggcacgttgaacaagcgggacgcctcgatgacttcgaggcccttgttcatcagtgtggaggagttgatggtgacaaccggccccatgttccacgtcggatgatgcagcgcctgctcgggagtgatgttctccatgtcggcacgtttccagccgcggaacggtccgccggaggcggtgaccacaagcttggcgacttcggcgtgggttccggagcgcagggattgccagatggcggaatgctcggaatcgaccgggttgatttggttctcgcgcacttgcgcgctgaacagcagatgcccgcccgcgactacggactccttgttggccaatgccagctgggaaccggccttgagcgccgcgatcgacggttcgagtccgatggagccggtgatgccgttcaatacgacattcgcaccggagccggccatggcgatgaccgaatccggaccgccggtcacgcggacaccttgtgcgccggcctgtgcgagagctgcttgcagcgctggaaccttggtctcatcaaacaccgcgacttcggacacatggaactgtgcggcctgttgcgccagcagctcgatatgtgctccgcccgccgccagaccggtgacggtaaatcgttcaggatgacgcgagatgacgtcaagtccttgggtgccgatggatccggtggatccgagaatgatgacagtggagttggaggctatgctcactgttccttcttcgtatcgtcattgttcagtgtggggaacgacaggtcggggatatccgaatcgaagttaccgccaagcgggaacagcagcgggaacgaatcgctggaatcgtgcttatcctgtgacggctgagctgcttccgtgtcatgggaggcggcaacgtattcagatgattccgcagccggacgggagatcgtgctgtctgcaggctgactatcggatacgcgaaccggaatggagttcgtgttacgatccggcttgctggtgggagcaaaggagaccggcatagcagcggacgcagcctcgtcagcagtgctattcacaggctgtactgccggggcggagggtgccggggatgaaaccgaacccggtacctcattcaatttcagcgcattcggtgcatcaaggctgggcatcttaggagcgaaggacggtgcatccactgccggaagttcctgagaaaccgcagccatgtgggcgagagcggccaaagaggaatcgttctgcaccatatccacgggctgttccgcgaacaccgacggggtcgatgacggagctgcgggttcgtgagctgcctgtgccggagcaaacgaggggacgctgccagcggtcacaccggaaaccggcgcggacggggcactgacgggaggctcagccgcagcaactgcggtaggagccacggaaggcgtctcggagacgggcttcgccgcagactcgttggacgcatgcaccgggtatgctgcgggagcaaaggaaaccggctgttccgcattggtgctattggtgcttgtggaagcatcgaacgatgcaggagccgacgcataggcgatcggtgccgccgcggccggcgctgcgggagcaaccggagccggagcagtgaacaagctctgctcggcctgatgcagggcatcgaatgattcgtcatgagcaacggcagccggagcaaaacgttcgtcagttgccgggcgctgcgttccggaagcgaacaacggtgagacgccgttcgcttgaacggtcacgttcgtggcggtctgggcaggagccgcaggctcgccggacacgaaatcggccacacgggcataggattccaagcgactcagcaactgtacgcaggcgttcaggaagtaatcgacctgtcgctcgtcatagcctttcttgcccttgcgctgggtgaagatcacattgttgaccgtattcgcattgagatcggccaaagaccgtacatcgtcttcggtaacgccgtcaacgcccaatgcggccgccgccttgtccacaatctggtcgaccagacgatccacctgcttcttatcgtacgaaggctgcttgggcgctccggacttgaagcgttcgcgctcgttacgctccgcatggttctggacttcgtgatacagcttctcggtcttcgccttccacgtcacacgcccatgctgtgcgatctcccatgtggtctgcttatcgaccacggcacgttccagacgtccaagcgcggcgtcaacctgtgcgatcacatagccgttcttgcgcaaatcaaaggacacgttctgaatgtcatgctgggtgagattcatgccctcgctgtcatacaaagcatgggcgcgctccaggaaagcgtccacctgagcggggtcatacccccacttgcgcttgcccgcacgtgcgatgcccgacttgccgtccccttcacgaagttcctgcgccatcggctattcgacctcctgctggatataaacactctgccacaactttacgtgactattgagacgcatctgaccaagaagaccgaaattcacgattttgtagcagtactgccggtttccttctgcacgcatctcattgagatttcagaacccttgccgaagactgtcagggaatatcgtcacagcctatatccgtggaatgaggggattgcatgaagcgatgaaaaatgaaagtgggcaatgagggactcgaacccccgacatccaccgtgtaaaggtggcgctctaaccaactgagctaattgcccgcaaatgacaacaatagcgtatggccggcactgcgcgacacgtggtgtcgcatacgcgtgccgtagcgctcaatcgcgatgacattcagtcacgcccagcagcactacgcagcacacgacgccagtcaacacgcttaaagtcaagcgtattgattgaggcttatcagcgacccttgccgaatgcgcgcaggcggatgccgttccagtccgagctgacggtcagcggggtggcggcgttcataccggcggtctgtgcggcggactgcacggtggatgagctggtggcacccgggcggccgggcttgggagtcagtatccacagcgggccgtcattgcccagtaccgcgtaggcgtcaacgatcgtatcggacaattcgtcctcatcatcgccgtcacgccaccatacgatgacgccgtccacagcggagtcgtagtcctcgtccacgagatcctcgcccgtgagctcttcaatctgggcacgaatggaatcgtccacgtcgtcgtcccagagccactcctggacgatatcgccgggctcgaaaccaaattcttcagcgttctgtgatgccgtttgattcacaggggacacattagcaagtcttcgcgaacaaatgcgttaacgcggccgaaaatcgccgcattgtgggcagacccatgcgagtcgtctcatcagaaacaacgactggccgcgcatgtcaggcctcgcaatgaggcaaatcgtcggcctgccccttgccgatggccaccaacgcctgatacgcctcgtccagcgtggcgaccttgacgtcgcgcagaccatccggcacgcggccggccacatccgaacaattcgacgcgggggccaggaaccatgtggcgccatcgcgcttggagccaagcatcttcagctctatgccgccgattctgccgactttgccgtccttgtctatggtgccggtgccggcgatggtcttgccgccgctctcgttggcgggggtgagtttgtcgatgagaccgagcgtgtacatcatgcctgcggacggcccgccgatgctgtccacgtgcatcgtcaccttggcgtgttgcaatgcactggcgtcaatgcccagttcgtccgcatgggctttggcatacgccagaccgacggcactggccgaatcctgggaaccggccatgtcttgttcgactttcttctgatactggtccgcactctggcccaccggtaccgtggcctcacgcggcatgacctccacctgcggattggcccaaccccagacggcctgcgcgttgatgaccgggtacccgggcacgccggacgcgttcaccgtggtcagcagcagcttgccggaatccttatatgtcgtcacgccggtaccagtgatgtcgataaccgtaccatcctcaactttgcccagcacatcctgggtgggtccgggcatctcgatgacgtacgggctgggcagcagcagaatcaccacaccaagcaacacggcgaatgcaccgacgaaatggcgtttcggacgagcggccgcataggcccgagcacggctgattccacgagataggcgcgaatcatgcttcacttcgaacgatggcatgtgctcatctcccgcttccgaatccgcagtcgggctctcctgctcctggacgaggtctggttcctgattcctgtggcgtgcaaacataccctacagtgtaagcggagggccgaaatcggccgaaaacgaacataaaccgaaaatattgctcggccacaagcgaacaggcccgggcagaccctacacttggggtaacacaccgcggcaaagaaggatacgcatggacgacaacgcgattcacgagtggctgatcaaatgcttcggccccattcagggtgagatggcctggcagcagatcagccagttgcctgaggagatccgtgaacagctgatgagtcaggaccccagccgactgcccaatccatccgaagtccagcagatgatggccgcgttcagcgccggcggactcaacacgatgggcgatatgcagcgcactgtcgaggaagggccgatcaacgtcaagctcgccaagtcgattgccttgcagcaggccaacgcctccggttctgcatccagcgtgtccgccgtggatggcgaggcggctcgccgcgcgatgagtgaggcgaacctgtggctggataccgcctgcgagttcaatcccgcgcccggcgatccggatgtgctgacccgcgccggctgggtggagggcaccatcgaccagtgggcgaagttcgcagctcctgtggccgagtcgatgaacgacgctttggcttcggtgatttcggagcgtcttggcggcgcgttcggcgatggcgaaattgccggcatgttcgccggaccggtgccgattccgattcccgacggtatgaaagacccagcccaactgatgaagctgctgggcaacacgtcctttgccatgcagttggggcatgcggccggcaatctgagccatgaagtgcatggcagcttcgatcagggcatcgcgttgctgaagaacccggctggtggactgattgcccagaacgccaccgaatacgcgaagatgctgaacggtgaggcttctgcggccgaggtcgacacggccggcacttcaaccgactcggtcaatccgttctccacatccaccgacgcttctgccaatcccattggcttcacttcggccggcaacagcgatactccggcaactgacggtaccgcccaagtctccggctctgatgcttccgccgatgccgccgacgccgccgcgttcgaggctgcgctctccggattcgagaccaccgagaaaatccccgaatctgaagtgctttccttcctggccctgcaggaaatggctcacgcccgcctgtacgcctcggtaccgtggctgatgccgcgtttcgaggcgctcatcggcaagtacgcacgcggcatctccatcgatctggatgcgatggaggaacagctgcgtgacgccacgtcgatggatccggagtcgatttccggcgcggtgaatctcaccaaggtcggcatccccgacactcccgaacagcgcgaggcgctggcttcgctggaatcgctgctggcgatggtcgagggctgggtggattgcgtggtgtggcgcgccggtatggcccatctgcctcatatcgaacagttgcgtgagatgatgcgccgcgagcgcgcgatgggtggccccgccgagcgtacgttcgaaagtctgctcggtttgcagctgcgtcccaagcgcatgcgcgaggccaccgggatatgggagatgatcaccgccgccgaaggccctgaaggccgtgacgccaagtggtcgcatcccgatctgctgccttcgctgcctggcgacaagcccgcagatggcgcgtctccgtcatccgacgccccttcaggttcttcttccgatgccaacggttccgcttctcaccctgccgcagatggcaagaccggcgatatcgattgggatgccgaactgtccaagctgctcggcgaagacggcgaagacggtgaaaacggcaactcggaggatacgcaggcatagtcaaccggccttcagccaattcccgctcctgacgacgttcaggagcattcagtatgcgttacagacgcccgtcacaaaaatcgtgatgggcgtctgtgctgcgctccataaccatccttggtccgcgcatacgacaaatgcagcgaatcctcagctcgggtgatgcccacatacataagccggcgttcctcttccagcgtatcccccgtttccggcgaaccgtacggcaagagcccttccgaacagccgatcagaaacacgtgcttgaattccagacccttggatgcgtggatcgtggaaatcgtaaccccgggatcgtcgtttgcggcaagtccggtggcgtccaaacccatcgcctccaatagtgcgcgtttggacgcggcatcgtcggcgagcgcggatgattgccatcccgaatccttgcggacgcgatatttcagtctcgcagcgcgcaaggcggcaccgaatacaggctgttgggcgttgatgcgggtgaggatcgcgcaatcggacggcttggccccgttggcaaccaaccgggctatgcgtgccgccacgccctgtgcctcttccatatcgctctcataagcggttcgggtaacgcgcgggccggattcacgggcggaaaccagtttcaggtaatcctcacggttcggcgcggccgcaagcacccggttggcgaggttcacgacttccggcgtcgaacgatagtcggtgttgagattgacatcggcggcgagcggcccgaattcatcggcgaaacgcagcagatcccagctggaggcaccggcaaacgagtagatggtctgggccggatcgcccacgacgcatacgttgcggttcattgcgctcttgccgtcaggtcctcccccgcccagccacagggtcagcagcctgtgttgcaggggcgagacgtcctgatactcgtcgacggtgagccagccgatggtggaacgaatttgggcggcggcttcgggaaaaccatccatgatatggcatacgagcaacagaatatcgtcaaaatcgatttcgccacgcgaggtcttttcctgctcgtaggcgctgtagacgtcggcgaaccgagcggtgtcgagtccggcgggcggctgcctatgggcgatggcacatgcccgggcataatcttccaccgccaccaacgagattttggcccaattgatttcggcgagcacatcgcgaacggtcagcggatcggcatcggtacgtgcggtggcgcggatgatcgcgcgggagacgacgtcacgctgatcttcgatcacatgcggaaatggagcctcgcatatgtctgtccagacgctgttgagctgatgcaatgccgctgagtggaaggtcgcggccgtgactccggcagttcccgcacccgaaccggaacgtccagtacctccccctacgccgagctggcccaatcgtgcgcgcatttccgccgccgcttttaccgaaaaggtgacggcaagcacccgctccggcttccatgccccggtggcgcaggcataggcgattcgccgcgtgaccgtgcgtgttttaccggcacctgcgccggcgataatgcgcaccggcccttgcaacgtagtcgcggcggtacgctgccgctcatcgagcccctcaagaatcccctgcgcctgttccatgcgtccattgtggcacgattcgcgctcacggcacgactcatgcctatggctgaatcgggctcacgacaaaacatcgccagaatcatgcgttttgcgtgtcattctgcggtgcgaatcgccacggatgtattagtgtggaagggtgatgaaacgtagcgattatatgttggcggcactcgcctcagccgtcctgccgaatctgggggtggccggcgtacgcgagaacgtgcaggccagcgcaaccgacgaggccaaaggcatcgatcagaccgtgattcaagatgcctcaggcaagttgtacgacgtatacgccactgacaccaaggaagggcgtacgcgtctgattcgccgtgtgaaagcggcgcagacactggcagccgcgcgcgagcctggtggcctcggcttcgatatggaccgtgtggtcgcgttcgccccgggagacgtttcccgacccggccagacggccaccgcacaggccgtggggcagcagacccaggcggagtccacaccgctgaccccgcgcaagcccggtcccacaggcgagacgaccgtgatgattgccgtccaccgtgatggccaggcgcggcctctcgacctgttgacattggatgactgcgcggccgtcggcaccgccatcggagccattcatcgcctgccttcgacttttctggccaatgccaaatatccggtagttaccaccggtcagattcgttcgcagctgaccgcctggattcgccgcttacgctccgccggccatgttccccaagaaatcaccgacagctgggcgcgcatcatggacaccgagggattgtggtcgttctccacctgcacggttcacggcggattttccgacggcgacttcctgttctccggttccaccatcaccacggtgaccaactggcaggatatgcaggtcaacgatccggcacgagaccttgcctggattttcggcaagctcgacgaatcccatcgcaacgccgtgctttccgcatacggccgcatgatgggctctcgacttgacgatctcatcatgctcagggccaacctgtggctgcagatggaacaggtgggcgaattcattcaggcgttgaaccgtgcggacaacgatcacatcatgcagttcaaggcacaggtcgaacgactcgcacaccagttgggcgtgatcaagcacactccggcaccggccccagacgcagggtcggccgccgcctcgtcaacgaagcccggtttgccttccacaatcaccgtcggcacattgttgcaggacgaccgtcatcaggcacccgcacaaccgcagcagtccgacaccggtaccgcggcggccgaggtctcggacgacacgcccgatcccgatcgcaccggttccgctgacatcgtggccgctggcgacgtggatcttaccccggaagtcgaacccgatgctgaccggaccgccaatcacccgcaaacgaatgtctccggcatcgcaaccggtacgggatcgaccaaaccgcagccctcacatggcgcttcccattcttcggtgacgatcacgctgaaggagctcctcagtatgaacgggcatagcggcacgacgtcaaccgacgcttcccctgcgtctcaatccgccgccccgaccgacgatgcggtgaatgacgatactccggacagtctcgttcagtacggagcctcgagtgcccaaaccacggtgattccgctgttggagcgggaagaacgcgctctgcgcgatgcccgtgccgggttggacgggtatgacagcgagggcaatccgctggccgaatcgtccacatcatccaaataatgtcgtgtgcggtgttccgcgccacgccgagcgcgtaacaccgcacatgacgacgcagacacgcggcacaatagagtacagaacctcggccggcgacggccacttaccatgatgttcgtcacaaagacggcagaacaaggagccttatatggatatcgaactgggcattcagaacgtggcacgatcggtgaacttcagcaccgacgaatcagccgacaatgtgagccaggccatcgcgcaggccgtggccgacaacacgacgatcgatctgaccgatgacaagggccgtcgcatcatcgtgcccgccaaggcactcggttacgcgatcatcggctccgaaaccaagcacgccgtcggcttcggcacgctgtgaccatgaatcgcgcataagcggccttgggcattatctcaaggccgcttttgtattgctgaatcaccgatatagcggaagcacgccgcgatgaacgatctcttcgacagtggcctcgtcggtgaggttttcccccagtttgttcggtttgcctttgccatgccagtcagacccaccggtgaccagcagctggtgccggcggcagatggtgagcagccgttctcgttgctccggtgaattgccacggtgccatacctccagcccgtccagtccttcgctgatcaatgcctcgatctggtcatcggacaacagtctgcggttacggctcacatcaccggcatgggcgatcagaatcacaccgcctgctcccttgacggcggccaccacttcatgagaggtcggcgaaggcgtgggaatatagtatttggatgaggcgctgaccgcatccgcaaacgcttccgaacgagtccgatatacgccggcactcaccaaagcatcagcgatgtgaggccggccaatggtggttttgccaccctccttgacttgggcgagcacggattgccaggtaatcggataatcacgagacaacaattcgaccatgcgctgcgtgcgttgcaaccgtgcggctcgagtattggcgaacaagtccgtgatgtgctgattcgtgggatcatactggtaaccgagcatgtgtacggagacgttctcatccgtggcggtgatctcggtgccgcggagcaacggcaaaccgaccctatgagccgcggcttcggcctccggccagccggcggtggtgtcatgatcggaaatggccacgcccttgagtcccaatgccttggattgttcggccaacgtggccggcgtttccgtgccatccgagaaggcggtatggcagtggatgtcccacccgacggcgggcggttccaaaggcatcacatatccagtcataccttccatcgtaacctcatttcagcattcccacgcaaggcgcagacaggtcgtcaccttctgtcaacggccaaacccagacattcggcactcagctgacaaccgcagaggctaatctggagcgcagcgctatcgaaagggacatgatgactcgtaacaccgcaaccgacacatcatccagcaccacgaacaccacgccgcttggcttggcggagacacgaccgttgattggatggcgccacagtgccacttggacatatctcatcatgctgattgcctcggcagtggcgttgggggcctcgctcattctgtccgctgagactttgcaattggctcggcatccggagtccgcgctcggctgcgatctgaactcggcggtgtcctgttcggcggtggcccagtcctggcaggcggaaatcgtgaaattcggcgggctgagctatccgaacgcgttcttcggcatcgccgccgaatcggtgttcgttaccatcgcggtgatcggtctggcgcgtgtgaaggtgccgcgttggttcgcgacctgcacgtggctgggcggactggccgctttggcttactcgtactggctgagcacgcagtcgctgttcgtgattcacgcgctgtgcccgtggtgcctgaccctgatgttctccaccaccatccagttcatggcgttgagccatgcgaccgtggccgtgcagggattgccgtcacgtaaggctgtggcggctgatgatagcgacagcgaggccgatgtcgcaatggtgccggccggactcaataagtattaccgcctcaacatcgacctcatggtcgatatactgtggatcgtggcgatcgtggtactcatcatcgtcaccgaaggcgcggccctgttcgctgcctgattcctttacaacaaatcgatatcggcgaccagcgtggctgctccggtcagctttacgtcgctgtcggtgacgtccacgcgcagggtaccgccacgtacggtgatgtcccagtggctgatgccggtcttggcccgcagcacaatgcctgtggcgcacaggccggtgccgcaggacagggtttcgccgcagccacgttcgttgacgcgcatcgtggcttcacccacgccggtgttctggtcgatgtcgtcgacccgcacgaattccacgttctggtcggattcgatgaccggagccaccactggtttggtgaccaaatccagtgattcaaccactggcagggacgcgaaggcatcctcgatcaccgcgaccacatgcgggttgcccatatccacaaacgtaccgcgcgccgagccctcagtgccggggatggtgacctcgtaggcgtcggtttcgccgatcttccactcccccatttcgacctggaacacgttggctccgtacggcctcatattgccgcgtggcgtcagaatcttgacgccggcacgggtgccgaggcggaacggctcggtggagtcggccaccccctcacgctgagcgaacaaggtgatggcgcgtgtaccgttgccgcacatctccgccaacgatccatccgcattgcgatagtccatgaaccatttcgcgcccccggccagtacgtccgaaagctgatcatcgcttaaatcagacacgaaatcaggccgtgtcaggcgaatcaggccgtcaccgccaatgccgaagtgacggtcgcacaggaatcggacctcatcggcggtaggctcgaatttgccggacttgtcgaggtataccacgaaatcattgccggttgcgtgtgtcttggttactcgttgcggaagactcatggctttcagagtactctagggagcgaaacaacaccgcaaaacaatcggctttgtgatcggtcgcggcaacatacggttgcaggcatggctatagggaggattcaggcatgagctcttcggctccaatcggcgtattcgattcgggtcttggcggtatttccgtggctcgccaaatcgccaaggatatgccggccgagcatgtgctgtattttggtgattcggccaacgcaccgtacggcatcaagacgcctgaacaagtgagggccctgagtttcgatattgtcgaacggttcgtgcgtcaaggcgtcaaggccgtggtcatcgcatgcaacaccgccacttccgccgcggtgaacgatttgcgcgaacactacgatattccgatcatcggcatggagccggccctgaaagtggcgtgcgaccgtggtgacgtgccttccgacccgcatcatattccccagagggtgattgtggcggccactcccctgaccttgcgtgagcggaagttcgccaaactgatggatcgattcgattccaacaacacgattttcaaggagccttgccccgacttggtggagatcgtggaatccgggcggctcggcgaccatgacctggtgatgcgcacgctgcacggctacttcgaccagtacgacatggagcatatcgactcggtggtgctgggctgcacgcatttcgtgttctaccgcgactacttccgcgagctgctgcccgaacgggctgctgtcatcgacggcaatgagggtaccgtgcgccatctgggcgtggtgttggagtccctgggcaaactggcacccgaagacgcgaccggcggcgtggagctcgccaattccgatccgtccgaacggattgccgagttgtcacgcaaattgctgaacgtatgagccgttcttggctcccctctctgagggaagccaaggaagaaccagacaaattcacagcacactgcccatatcgttgtccgtgcagcacgcgtaagctcataccagattcaagtgaacagggggttggtatgacaaagacggcgatgattgatgtcggcggcgggttccgcgcgattttcggctgtggtgttatggaccgcatgctggaggacggcatcgacgtggatatgtgctacggcgtttccgccggcgcggccaatatgacctcattcatcgcacgccagcacggccgcaaccacaccttctacaccaagtacgccttccgcaaggagtacgcgagtgcggaaagcttcttcaagaaccacaactttgccaacctcgactacatctacggcacgctgagcaatcacgatggcgagaatccgttggatttcgcggcgttcgaggccaatgagaccgggttcaccgtggtggcctgcaatgccgaggacggctcgaccaagtacttcgacaaatcgcgcgtgcgctttgatgatttcgacatcatcaaggcttcgtccgccgtgccggtggcctgcgagccgtatgtggtggatggtgtgccgtatttcgatggcggcatcgccgatccggtgccggtgcagaaggcgctggaggacggctacgatcgcgtgattctgattctgtctcgcttgcgtgacgaagtgcgcaagcagcagaaggatttggctccggcccgcatcctcgaacgctcccaccccgccgcggccgagaagctgcgcatgcgctacaagacctacaacgacgaactcgaactcgccaagcgttacgaagcggaaggcaaagtgctgattctcgcacccgaagacctgtatggtctcaacaccctgaagaagaatttcgagggcctggaaatgatgtatcgcaagggatacgcggcggccgaggccattccggcattccttcaggcatagcgatagtgaagtccctcgcttggagggacttcactatcgatggatggggattcgcaaacggggtgattacttcgtctcggaagcggtgagcatggccttggtgacctgctcgtagagatcctgataaccgccgggcgtggaggcgggcagcaccacggtcttggtgttgttcgattcggacagcgagcgcatcacgtcgaggtactggttgaacagcaccacgttgttcacgtcgttgatgttcatgcccacagcctgcagactcttgatctggtcgacgataccgttggcgatctcgcggcggtaattggcctggccctcaccctgcaagcgagtcttctccgcatcggcggcggcttgggtctcgatctggatacgctgggcctcggcacgctgacgggtggcttccttttcacgctgggcggcgttgatggagtccatcgcgttcttgacctgtgggctcgggtcgatggcggtgatcagcgtcttgaccacggtgaagccgaaacggctcatttcggcgcccacggtcttctgcacgtcgaacgccacatcgtccttgcgggcaaaggcatcgtccaaagacagtgcggggatagcggaacgcagcgcgtcctccatgtaggagcgcagctgaccggccgggtcacgcagctcgtagtaggcggtggccacatcgttcgggttcacgcggaactgggtggaggccaccacggtgacgaacacgttgtcgagcgtcttggtttccagctgcacgttaagctggttgacgcgcatgttcgttttcatggcgatgcggtccacaaacggaatgcggatatggatgccggcgaactgcaccttaaggaacttgccgaagcgttcgatgatgtacgcctgctgctgcggcacgacgaagagtgcggcagacagcagaacaatgagtagcacgatgataatcagcggaccagcaaagaatacggccatgatgttttcccttcacccacgtcgaaaccgccctcggcctcgactcgtgatttccatcgtatcagcgttcaaaacaaagcggtagacatcgtacgcatatgtgtacaactgttcactatgtgtgcatgctggcttcttataaaaaagtgcggcatccaatcagtatgctgcggccatgcctgagccgacagccacggcgccgataccgtcctccagcgcggcaagccgcttttccagtgcatcgacagtgggattggccacacgggagtactcgaagccgtcgatgtcaccgcccgcgagcgcatcgccgcgcgccgcgtcacccaggtcgaatgcggccgaggcatagattggcggcacagcggcacggccgttatccagcggctcgtagccggcgtggatggcttgcgttcggaaatcaacgcccattaatccttcttcctcatgccgctctattgtggcgggctcgactctattcccgaacttagcaagtcatggtacgcgacaccggcacatcggtatcgcaattgtcaatgcgcgcttataagcaatggctatagaatatccgccgaatgccggaacacaccaagctgcccagccctctttcagcacctcggccgcaatattacgctgcctcaaataattcaaagccgcgtcaatccgtaccggttcaccatcgaaaatggccacgatgccccctatcggggtatccgcgacgatgtcgatatctccaaagattatgttgacatcgatgccgaaccctttagtaatttgcgacaccaacgcttcagaaacttccttggacacatattgcatccggaccaatcgttgaccttcagacaatctcatcaaaagggagtcatggttctcttttcatatctggcgataacgcatatcaaatcagcaatcagcgcaaagacgctcggtcactccatccggataacaactttgccgtttcgcctaaggtgtcgatgacatggtcaaccggtgcgtcagaaagagcttcagcatagttctcgatgcgatagtcgaaataacgatcggcgcccagcgcgctgctctccgaaagcaccgggacgaacgccgtcagcattcgtaacgccttgggagcgctcaaacgcgcggggctcatcaccgtggcacgcggaaccggcggcgccgaacttgcccacaccccccaaggaaatcactctgctcgatatccatcaggcagtggaatccacgaacctcgatgatgtgatcggcctccacgagagagggaatcacacatgccccgtggctcggaatatccacgacgttctcaaagatgcgtatgctccagtggccaaagccatgtcggattccatgagggaagttgcgcttgccaatatgcttgccgactaccgaaatcgcattggggtcaaagcccggcaattggaacagtagtgggcaccgaagcgtaagcccccctactctctgatccacataaaggcgggttctagtgatcgttgcaacacctgacctaccgcaaggagggtcaggtgaccagaagccaccgaaacgaagaccgtggcggggaacaccgttggacgttcaacggcgtcgaatatccgacgaggaagctgatgtgcgaggcgagacgcgccgagtacgtgcgcctgctggacgaggaaggcatgaacttcacccaggccgcgcacgcggtcggcgtctcgaaacgcaccggcaaggcgtggcgcaacggcaggacgcgcgccacgggaaggaacgagaaacccctggtggactggtatcgttccaccatggacaaacccaagaccctccatccgcgatacctgagccaggaggagcgcatccagatcgcggaccgtctgcgtctgggcgattcgatccgcgccatcgcccgcctgctgggccgcgaccccggcacggtcagccgcgaggtcgagcgcaacaggaatcccgagtccggcggttacgagccttaccgcgcccagcagaaggccgcggaccggctcaaacgccccaaaccgcgcaaggcggccgagggcacgcgactgtgggacgagatcgccgccgggttgcgcaggcattggagcccggagcagatagccaaccggctgaggctggacttcccggataatggggatatgcacgcgagcgtcgagacgatctaccaggccatctacctgcaggccaggggcgaactcaagcaggagctgaaacgcgccatgaggcaggggcgaaccgcccgcagaccccaaggcggccaaggccgcaaaccccgtttccgcgaacccatggccatgatctcggagcgacccccggagatcgaggaccgggcggtcccgggccattgggagggcgatctcatcaccggcagccgcaacaaaagcgccatcggcacgctcgtcgagcgcaccaccaggttcacgatcctgctgcacctgcccgacgggcacgacgccgaacacgtccagcaggccatcatcgacaagatgcagcacctgcccaaactcctgcgcaacagcctgacctgggaccagggagcggaactcgccctgcacaaacggatcggcgcctcgctggacatggccgtctacttctgcgacccgcactccccgtggcagcgcggcaccaacgagaacaccaacgggctcctgcgccagtacttccccaagggcaccgacctatccgtctacccggaggactacctcgacgcggtcgccgaggaactcaacgaccggccacgcaaaaccctcgggttcatgaaaccaagcgagaagatcatcgaactgctcgacgccgcgtgataacctcaacaaccgacaacgtgaccatggaaggccgctcaaacctcaggtgttgcaaccaccactagaatccgcctaaacagataaggcgtgcgccatcaagaccgatcgatgacgcacgccttatgcagctcagaccacggattcctagtcagccagcagccccagctcctgcagcttgttcttgatatccactgcagagggttccacttggaacgagccgtcatcgtaccgcaccaccggaatgtgcatctggccgctgatcgccacggcacggtcggcggcaccttcctcttcctcgatgttgtgccaagtgtatgccgcgcccagtttgtcgagagtgttctttgcctggcggcagtcgccacaccatgtggcaccgtagacgtcgatggtcatatcgggtcctttctttgttccgccgcgcttgacttttacgcggtgcactatcaaaccgtattcatcgtaacggggatgctgtgatatcgcggttggcataatgcgggcggtccgcttaaccaccccagtcggctacgccgacagccctctgccagcggaggcggaaccagagcataaaaaagcggctccggtgtggcacaaccgacgccgctccccaggagtagaaaaataggcagaaaagaattagatcaggcaaacaccccccgaagtcagctgttggaacacgtcgaagtcggcatgccgatcgatgtaacgggcgtaagcgatatcgaacgcctggccgagatcttcgatcagatcgttggcgtcctcgatgccaacggcgagacgcaccaattcatcggtgatgccgatcttcagacgctcctcgcgaggcagttcgaaatgcgtcatacgacacggcagctcggcaagagactccaccgcacccaacgacacagcaagacggaacaggtgcaggttgttgagcacgtcagccggatcaacgccaggcacgacctcgaagctcaacacgccaccggcccccttgagacctttggcagccagacgctggtcgcctgcgccgggcagacccgggtaatgcaccgccttaaccagcggatgcaccagcaggtagcgggcgatggcattggcattctcctgctgacgatccatgcgaagggccagcgtctgaatgccgcggcgcaccgcgtcgcactcagcaggagccaacacaccacccaaacggttctgcgcgaagtacacgcggctcgccagatcctcaccggaaacgaccaccagaccggcgttcacatcagaatgaccggccagatacttggtggcggagtgaatcaccacatcggcacccaaagcaagcggcttctgcagatacggggtcacgaacgtgttatccacaatcgaaagcgccccgaaacggtgggccaccgtggagatggcgcgcacgtcgttcaccttgagtagaggattggtcagggtttcaaagtagacggcttgggcaggcacgatgccgttcgcgcggtcgcccttgacggcggcctccaatgctgcgatgtcctgagtgtcgacggcctcgacgaggattccccagcgagtgaagaactcattgagctgggaatacgatccgccataaatattgtcaccgaccacgatgcggtcgccgggcttgaaaatgctcagcaccgcgtgaatcgccgcgagaccggaggcgaacgcaaaaccacgcgttccctgctcgagctgggcgatctgctgttccaggaagtcacgtgtgggattgccgcttcgtgcgtagtcatagcggggcatcgcgtcaaccttctcgaaggcatatgtcgttgagttgtagatcggcgggttcacggctccggtgttgttgtctccaaccggcagtccgtggacgagctgagtgttgaacctggtcattgcgcacccccttaaagtgttgcgtcatctgcgcgaagccgttccccgcgcggcacgattacgaccttaacgcaaaacgccggcccgaaggccggcgttgctatatgtgttggttatggacgggtataatcagacctctccgtcctgcaagaatggacggcctgacgaccggcccaacacacctcgccgctgccgcggctcggcgtcgcctacggacagtccaccggactgtccgtcagacggctccgccttctaccacgatgtcatcggggttgacttcgttgccgtagaccggctccagagtctcctggtaatccttgtggaagaagttgtctttgccgagcttgacgatctcgtcgttcacgaagttcagcagttcggtgttgcccttctgcacggcgggcgcgatggtgtcgtcgtcaccaaggtgggtgatgccaaccttgaagcccttgttggacttggcccaggcgagcacctcggtgttgtcggtggagaaggcgtcaccacggccgtccagcagcgcgttgtaggcatcggcgtactggtcgtacttctgcagcttgacgttcggcgcgttcttctcgaaccaggtttcggcggtggtgcccttagcgatgatcagggtcttgccgtcgagctgactgacatcggtgatctgggcgctctccggggagaccacaccaagcgccaccttcatgtacggcttggcgaagtcgaccttctccttgcgctcatcggtgacggtgaaattggcgagcaccagatcgaccttgttggaggtgagcacgtccacacgggcagccgggtcaaccgacgtgtattccggctccacacccagatccttggccagctgttcggcgaagtagacgtcatagccctggtacttgccgtccttgtccacgtagccgaatggcgccttgtcggagaagacggcaatcttgatcttgccgctcttcttgatctcgtcgaggctgcgggccttggcattggcgctggagctggtgcccgtgtcagaggacttcgcttcgctcggggtgcctgccgacggaccgcatgcggccatggacgccgccattaccaatgccgcgcctgcggcaatcagtgctttgaatgatttcccaaccttgatactcattgggttctccttctcttgttgttattgatatttcttctcaaatacgtcgatatggcacaatcgaatcactcgaattcgaaggtgtgcaggaactgctgcgcacgttcggtttgcgggtgttcgaagaacgcctgcgcatcatacgattcctcgacgatgcgcccgccgtccagcaagatgatgtggtcggcgatggctcgcgcgaactgcatttcgtgggtgacgataagcatcgtctgcccggacttggccagttcgagcaccacgtcgagcacttcacgcaccatttcggggtcgagagccgccgtaatctcatcgagcagcagtacttccgggtgcagaatcagcgcacgacaaatggccacacgctggcgctgaccgccggacaattcgtgcggccaagagtccttgcgatcggcaagtcccacgcggccaagcaaccggatcgcttcagcctccacctcggacttatcgcgtttctgcacgagcaccggcgccatggtgatgttgccgagcaccgttttgttcgggaacaaatcgtagctttggaacaccatgccgatacgcgtgcgcagttcactggaccggtcggatcgtccggctcgttccgtgccaggcttgccggcatcgatcacctgatcgttgatggaaatcgtgccgccctgaatcggttccagaccggcgatggtgcgcagcagcgtcgacttgcccgagccggaaggacccagcaccacgagcaccgaaccatgctccaccttgaaggagatgtcatccagcaccggcttgtcggcattcgcatactgtttgaccagatgattcacctcgaaacccttgcaggtcgtttcgggttcagtcattcgaccacctcttttccagtcggcgggccacaatggacagcggccagcacacgatgaagtacataaagaaaatcacgccataaatccacaaggttccagtcgggaactggaatcggttcgcgtcgataatctgctggccgaccttgatgacctcgaccacaccgagcagcacggccaatgatgtcgttttgacgatacgtgtcgccaagtttacggatgccggcagcatacggcgaacagcctgcggcagaatcacccgggagaaggtctgccacgggctcaaccccagtacgtagctcgattcgtactgcactttgggaatcgactgcaatgcgccacgcaccagatcgcccagctcggcgcctccccacaggatgaacaccagcacgcaggcaccggtggcatcgagattccaatcgaaccatcgagcaaaaccgtagtaggcaaggaacagcaacgccagctgaggcataatgcggatgaagtcgaggtagatgcgcatcgcggcccggatcacgggattcttcagcgtcatcaaccagcccaccaacaggccgaccgggatggacgcgcctacggatacgccggctatccacacggtgacccacaggccttgcaacagacgtgggaatacgcccggctggagcagtatttcagcgccgctcataatcgaacctccgctccaaccatgtgccgaagatggaaatcggcagcagaatcaccagataggccacgaccagcatgaacaacgactcataggtgctgtaatacatgccgatcagatccttggccatgtacatcacgtcggcgagcgcaatggcggagacgacgctcgattccttaaacaggaagatcacattggccactacgccgggaatggcggtggacactgcttgcggcagaatgactcgggtgatggtttgcgtggaagtcagtcccagcacgtacgcggtttcgcgctgcacgttgggcaccgcttccaatccgccgcgcattgcctcggccatgtaggaaccgcccaagaatccaaggccgactatcgcgcaggtttcggcggaccatactacgccgagtttgggcaggccgaagtacagaaagtacagctgtaccagcaatggcgtattgcggctgagttcgatgtagattctcacgatttgccgggcgaccgggatacgcgcgatttccacgccagcgcagaccagacccaccgcgatggcaagcaatatgccaaacacggatatgaataaggtcatcaatgtgccgttgacgaagaaaggcgcgtaacgctgcacgaacgaccaatcgaatgtcattgggcgcgctccttcctttgcttctcgtttcttctcctgcgcataaacggtcttagccacccatgtacgatttcgggggccgaacatacctgtccccctgccgtgtcatcgtagagtatcagaacacgtggcacggccgctgcgctatacgcattacttatgggacgttactcgatgggcgaacatcagggcattattgtcgcccaaacggtggatacactgaggctatgaagatcaccaaagctctgacccgtttgaccggtcccgaaaccgctccggtgttcgtgctgttgcacggctggggttccaatgaatacgatttgcccgatctgctgaactattgcggtgccggttcggctgattatgccagtttgcaggcacccatcgcctatggcatgggatatacatggttcggtgcgtgggcgcatgaaggtgtgccggagggcgaatcattagacaagcaggcgactgaagccgcccaagccattgatgcatgggttgcggagcatattcccgccactcggccggtggttgccatgggattctcgcagggcggcctcttggccgcgcatctgctgcgtttcaatccgaagcgatatgccgcagccgtctcctgctctggatggctggcaccggggtccgttgcgggcgatgccgaattggcttcgttgaagccgccggtgttctatgggcatggtgctgcagacgacatcttcccgaaagccgatgtgacggcgatgggtgagttctggcacgagcacggcacgttgaccgaacaagtgtatccgggcatggcccattccattaatatgccggaaatgcgcgatattcaacggttcttggagaccaacggattcattcggccgcagatttggtagtcaccacctcacatggcgtagtcgacgtgggcgaattcggggactttataccatttgacggggtagccggcaccgtgggcgcagaagaccgagtcgggggtgttgtccagatctgcttcgggatcgtaagcggcggctgcgatgacctgttcggcgtcatggcatggcttgtagccgccgaaagtggcggagaaacggccatggccgtgcgtgtactggttcacatccatcgcatagtcgcgcatctcggacaccggcgcctcgccttcgatcacggcgtattcgccatcggtgaccggggattcgaaggtgccggccatgcgctggatgtcgctcatggcacggccgatcatgtctgctggcacttcgagccggaaccgataccacggttccagcagtcggcagttgccctcccctgcggtgtccggacggctctcgaccggcgtctcgggccggccactgactccagctctggcttccataagcccctgacgaatcgcacgataggtggcttggcggaagtcgccgccttcggtatgcttcagatgcgcgcggccagccaccaaagtcatcttgatatcggtgagcggcgcgccaacgagcacaccgagatgctcacgctcggtcagatgggtcagaatcagccgttgccaattgcggtccaaatcgttttcggacagggccgaggccacagtgactccgctgcccggctcccctggttccagcaggatatgtgcttcggcataatgacggagcggctcgaaatgacctgcgccttcgatcggcgcagtgacggtctcacggtacaggatggagccggggccaaacgacacatccagaccgaaccggtcgtgcagggtctgctggatgatctccagctggaccgcgcccatcaattgcacatgaatctcggccaaccgctccacccagaccacatgcaacaacgggtcttcgtcttccagctcacgcaatgcggtgatgaccttatgcaaggtcagatcatcgaactggggacgggccggcgagctattgtccgccgcggtctggccggcggtgtcgttctcctcattgcggccggttcccgacttggcggcatcatgctcggcatcgtcctgattcacgttgttatggccggcgtcaccgcgtttggccgctcccgaggtgccggccgtatcggattccgctccggcgggcaacaccgtgtaggtcaacacgggttgcagcgacggtgattcggcgtccggttccgctcccagcccttcgccggggaaggtccgcgtcagtccggtcaccgcacacaccgatccggcaggcacctcggtgaccgtctcgaatttggcgccattgtagacgcgcacctgatcgactttctcggaccataccgtgccatcatccccctgtaccggcgacggtgctgatgacgccgcagcgcacgaggatgaagagacgatctccttggctttgagcgcaccaccggtgacgcgcagccacgtcatacggttgtgctggccgtcgtgggcgattttgaacacgcgtgcggcgaaggcggccggccattcacgttcgcgggtgaacgtctccagcccgtccaggaattcctcgaccccttcgagtttcaatgccgagccgaaatatacggggaacagttcgcgtacggcgatcatcgctcgcaatctgcccacggacagcgcgccatgttccagatagtcgttcatcgcctcctcgtccagggtggcaatgtcttcggcgaacgcgtccaacggtaccgcgctgccctcagtggactgctccattgccggcagcggatatatcgcatcgctcaggcgtttgcgcaactgtgccagaatggcctcgcggtcgaatccggcggcgtcgcacttgttgacgaagatgaacgtcggcacaccgtatctggccagcagacgccatagtgtctcggtatggccttgcacgccatccgtgccggagaccacaagaatcgcgtaatcaagcacacgcagcacacgttcggtttcggctgcgaagtccacgtgccccggcgtatccagcaaggtcaggcgcaggtcgccgtgttccaccaatgcctggtgcgcgaaaatcgtgatgcctcgcgccttctccaaggaattggtgtccagaaacgcatcgccgtgatccactcgccccaatttgcggatctcaccggtacggtagagcagagcctcggacagcgtggtcttgcccgcgtccacatgcgccacgatgcctgccactatctgtttcatcagctgtgctcccttcccgatgcgccgcgcaattgccggccgcctaaccaatatatccgagaaaatccgggagggaaaaattgtaccgacagaccgggctgccggtacaataagtcaccgaacaccgactgatatgaggagcctccgtgaccacttccggcattaccgttttcggccaaccatcccagcccaatcatggtgccggcgggcgaatcgccatggacgatgccgtcttccccaccgattatgtggcgctggatttggagaccaccggcttttacccgaacagttgcgccatcacggaaatcggtgccgtgcgcgtgcgggaggggcatatcgtcgatcaattccagcagctggtgaatcccttgcggccgattccgcgtcagatcaccacgctgaccggcatcaccgatgcgatggtggccgatctcgatccgattgacgaggtgcttccccgattcatcgcatggctcgctaccccggctgccggtcccgccgttgagccgattgtcggccataacgtcagcttcgatctgcgattcctggattacaacacccggcatatcgccggctgcggctttgcctgcgcggattatgacacgatgcagatcagccgcgccctgttccccgcgcagcggcatcaccgtctggccgacctgatcgtacgcttcggcatcgcggacaatgaggagcaccgcgcattaagcgatgccatccaaacccagcagtgcttcgaatggatgcggcattacgtcaccgagcatcacgaaaccgaagcaatccgctggaagcaggcgccggccaaaaacagcgccgaaatcctccaccagcagttggtggtaaagaggtagtttacagcccgtattccttggcgatgacggaccagaggtcggcagcggcctgatcgacggtttcgttgacgatggtgacgtcgaattcgctttcggcggcgagctccaccttggcggtctccaagcgacgggcctgctgttcggcggtttcggtgccgcggccgatcaggcggcgctcgagctcttcgaagcttggcggcgcgatgaacacgtacaccacttcgaggtcgagctcggcggcgcgctgcttgacgcggcgggcaccctgcaggtcgatttccagaatcgtgggcacaccggcggccagatgttcctccacaggcttcaacaaggtgccataatgggccatgccgtgcaccactgcagtttccaggaactcaccggccgcctcacgggccaggaactcgtcttcagtgaggaaccaatagttgacgccatcaacctcgcccgggcgcggagcgcgtgtggtggcggagacggacacccacacttcggggtggtcggcgcgcagcttggcttccacggtgcccttacctactgcggtggggccagtcaggacgattagacggccagcatgggtgttttcagtcatgggttcctccggagatgatgtggtgtgcagcgattatgaatccaacgtggtaacggctcaccggcgagatgaccggtaactgctacagccccgacgaacagggaagaatatgaatcgtgatgcgacgtacgcgatgagatagacacgtacgcatgccgcgacatctgattccgttctgattactggttttccgagccttcgacagtggcttccatcagcgcctgacgtacgtcaagcgcaatcgactcggtggcttggctcagtgcggcgatatccggcccatgcgaggcgataaagcgggacacggtgaccagcacgttgccgcgcgtaccgcggaacacggttttcagatccttggcctcggcaccctgccaaccgtaaccgggggaaagaatcggaccggtgaacttggaggggtccacgccggaatcctgcatccattggccgatggtggcaccgatgatcagacccaccgagcccatgccttcgatatccacgttatgcttctgcgcggtggaggcgatgccgtaggccacggtacgtcccttgtaatcgccgctctggcgcaacgcggtctgcagactcatgccttccgggttggaggtcagggaggcgatgaacacgccgcgtccgttttccagcgcttcggtaatcaggccgttcaacgaacgcgcgccatagtacggcagcagcgtgatggcgtcggccagcaacggtgcaccgggcttgaaataggcgtctgcgatggcggaaatcgtggtggacaggccgccgcgcaggcaatcgacgatggtgatgacgcccatttgtcgtgccgcgtagagcacgcgctcgagcgcttcgaaacctttggctccgtagcgctcgaacatcggcgtctggaatttgactgctgcggcgcgcccgttggcggcctgcagcatacgcatggagaagagttcggcgccttcggcgtcgacgttgtatccccagtcggtgaggagcttgcgatgcgggtcaatgcccacacacagcggcccgtatttggccattgaattgcttaatcgcagaccgaaatccgaacgttgtgcctgcaattcctcactgctgagtgtagtcatcagaactcccgtcgctccaattcgaacagctgcttcgaatgctcctgaatgctcatgatctgataatcattatgcttcacggcctcgatagcgagcagtgcggcctggaactcggtgatggtggtgaactgcggcagatcggcggcaatggcggcggcacggatggagtagccgtcggaacgggagccgcgcgagttcggcgtgttgaggatcatgtcgatcttgccttcctcgatgagctgaaccacgttcttgcccacggatccggcagcgtgatgcacctcgaccggggcttccggatcggtgtccacgcgggtgctgatcttgtccacgatgttcgactcgatgccgtaacggcgaagcacggaggcggtgccctcggtggcccagagcttgaatccaagctcctcgagacgaacggcgatcaacggcagctgacgcttgtcggtgtcgttcacggagatgaacacgttgccgtgggtcggcaggccaccgtcgtaggcggcgagctggctcttggcgaaggcgtgcgggaagtcacggtcgaagcccatgacctcaccggtggaacgcatctcaggtccgagcaggatgtcgacggtcttgcccaccggggtgcggaagcgcttgaacggcagcacggattccttgaccgcgacctgctggccggggtggatgtcgccgccgtcgcccttgggcagcagcagaccgttggcacgctgatcggcgatggtttcgccggccatgatgcgggcggcggccttggccagtgccacgccggtggccttggaggcgaacggcacggtacgggaggcgcgcgggttggcttcgatcacgtacagtgtgttggccatgaaggcgtactgcacgttgatcaggccctgcacatggcagcccttggcgatggcgtaggtgccttcacgcaggcgacgaatctggtcgtcggacagggtggacggaggcagggtgcaggcggcgtcaccggagtggacaccggcctcctcgacgtgctccataatgccgccgatgtatagttcctcgccgtcgaacagtgcgtcgacatcgatttcgatggcgtcttgcaggaacttgtcgatgagcagcggggagggcaggcgaccggagaccacggtatcggccttggcctcggtaagtgcgcggtccacgtacttgttgagctgcttgtcgtcgtagacgatttccatgccacggccgccgagcacgtagctcgggcgcacgagcaccgggtaaccgatgcggtgggcggcttccttggcctcttcgaggctcagggcggtgccgtaacgcggggcgttcatctccgccttcttgagcacctcgccgaacagctcacggttctcggccagatcgatggattccggggtggtgccgagaatcggcacgccggcggacttcagacgcgcggccaaggacagcggggtctggccgccgagctggacgatgacgcccttgaccgggcccatcttcttctcggcctcgtagatctcgagcacgtcttcgaaagtgagcggctcgaagtagaggcggtcggacatgtcgtaatcggtggacacggtctccgggttgcagttgaccatgatggtgtcatagtccttgccgagctcctgcacggcgtgcacgcacgtgtagtcgaactcgatgccctggccgatgcggttcgggccggagccgaggatgatcacggcctcgcgctcgcgcgggcgcagctcggtttcgtcggcgtagcagctgtagtagtacggcgtggcggcgtcgaactcggcggcgcaggtgtcgacggtcttgtagaccgggcgcagaccgtaggtccagcgcagttcgcggatggtgttctcgccttcatcgcccaaaccacgcaggtgggccacctgcacgtcggacagaccggcgagcttggccttcttgagcagcctcggggtgagggtttcggcctcgcgcaccgtcatggcggtctcattgatgaggaagatctgcttcaggaaccacgggtcgatcttggtggccgcgaacacctgctccagcgtggcaccgccccagatggcgcgcatgagctgcaggtaacggtgttcggtcggggtgtggatggcctcaagcagttcggccacttcttcggcggacggcttctcgccatcccaattgaagcccatgtggcgcttgtcgatggagcgcatggccttgccgagggactcctggaagttgccggccagggccatggcctcgcccacggacttcatggaggtggtcagggtggggtcggcgcccgggaacttctcgaaagcgaagcgcggcaccttggtgaccacgtagtcgatggtcggctcgaaggaggccggcgtggactgggtgatgtcgttgcgaatctcgtcgagcgtgtagccgagggccagcttggtggcgatcttggcgatcgggaagccggtggccttggaggccagtgcggaggaacgggagacgcgcgggttcatctcgatgacgatgatgcggccggtgtccggatgaacagcgaactggatgttgcagccgccggtgtccacgcccacgccacggatgatggcgatgccgatgtcacgcagcttctggtattcgcggtcggtcagggtgaagcagggggccacggtgatggagtcaccggtgtgcacgccgaccgggtcgacgttctcgatcgggcagacgaccacgacgttgtcgttgcggtcgcgcatgagctcgagctcgaattccttccaaccctcgatgccctcttcgatcaggacttcgtcggtgggcgagtaatggatgccggcgccggcgatgcggtgcagctcctcctcgttgtgggcgatgccggagcccaggccgcccatggtgaagctcgggcgcacgaccagcgggtagccgaacttctcggcgatcttgtcgacttcctcgatgctgtgggcgatgtcggagcgggcggattcggcgccggcctcgtcaacgaccttcttgaacagttcacggtcctcgccacggtcgatggcttccagggaagcaccgatcagttcgacgttgtacttctccaggacgccggcctcgcccagcgccatggcggcgttgagtgcggtctggccgcccaaggtgggcaggagcgcgtcggggcgttccttggcgatgatctgctcgaggatcggggtggcgatcggctcgatgtaggtggcgtcagccatctccgggtcggtcatgatggtggccgggttggagttgacgaggatgacgcggatgccttcctcacgaaggacgcggcatgcctgggtgcccgagtaatcgaactccgcagcctgaccgatcacgatcgggccggagccgatgaccatcacggatttgatgtcggtgcgcttcggcatatcacttaccttccttggagttgttcttcataagttcgcagaaacggtcgaacaggtaggccgcatcgtgcgggcctgctgcggcctccgggtggtactgcacggagaatgcggggatgtccacgcactgcaggccttcgaccacgtcgtcgttcagatcgatgtgggagacgaacaccttgccgtacttgccgttttcaaacggcgcgtcgacctgcttgccgatcggggcgtcgaccgcgaagccgtggttgtgggcggtgacctcgaccttgccggtggtcagatccttgaccggctggttgatgccgcggtggccgaacttgagcttgtaggtgccgaagccgagtgcgcggccgagcagctggttgccaaagcagatgccgaagaacgggtagccggcgtcaagtacctggcgcagcagctcgatttcgggaccggcctgttccgggtcgcccgggccgttggagaagaagacgccgtccgggttcaggttctcgatttcggcgaaggtgatggtggagggcaccacgtgcacgcggcagccgcgttcggccatgcggtgcggggtcatgcccttgatgccgaggtccacagcggccacggtgtacagcggctccttgccttcgtactcgccgcacggttcgatggtgtaggtctccttggtggacacctcgtcgtacaggctcagaccctgcatctgcggggtgttcttgacgtcttcgagcagctgctcgatggtcttgagcgcgccggtggcctgatcggtcagggcgtcgccggagaagatgccggcgcgcatcacgcctgcggaacgcaggtggcgcaccagcttgcgggtgtcgatgtggctcaggccgacgatgccgttcttggcgaggtcgtcgtccaggctgccttcggcacgccagttgctcacgttcggagagggatcacgcacaatgtatccggcaacccagatgcgggaggactcagggtcttcgctgttgacgccggtatcgccgatgtgcgggaacgtctgcacaacgatctggcgatcgtagctcggatcggtgagcgtctcctggtatccggtcataccggtggcgaagacgatctcaccggtcgtctcgccgagggcgccgtatggctcccccacatatacctgtccgtcttccaaaacgaggactgcatcgtccttgtcatacatcggaattgcgatggtcccggactcgttctggctcaccaaaacccccttatgtttttcgggtattcgtaccaaggttaacggccagcgcagactcacacgccgttgggcgcaaagtctcacccccgctggcggggctgtcggcaaggtgccgacttgagaatgtacggcggcacaagtgtccgcccatgaaaaagcctcccgaatggggaggctgaacaacaaatgactaatcgaccgtcggctgaatctcagcggacggggcagcaggctcgtcggatgcaccggacgaatcgggcgaatcggaaacatcgccctcatcggtcggctcggatgcggcggcagcggaatcggacgattcctcatcggcctcttctgccacggactccggtgccggtgctgcgttcttggcggtgcacaccgcagacagcaggccatggatgaaagcgggcgaatcgtcatcgcacagggtcttggccaatgccagagcctcgtcgatggcgaccttgtccggcacatcatcggtgaacagaatctcccaagcggcgatacgcagaatgttgcgatcgaccacgcccatacggcggaccttccaacccgtggagtgttcgtccagggtcatgtcgatctgacgacggtgctcggccacgcccttgacgatttcaatggcatagtcgggaagcggggtctgggcaccgggatgtgcgatgcgctcgtcaagcagggagagaatatcctggcttttttcgtcggcttcgtacagggtgttcagagcccttttgcgcgcggtggaacgtgccatactgctgctgtcctagtcctttatacggtcggtcgtctgttgaggatgcggagatcagttgttctcgcggccggtgtaggaaccgtcctcggtgttgatcttgacgcggtcgccctcattgatgaacagcgggacctgaatctcggctccggtctcaacggtggccggcttggtgccggcgttggagcggttgccctgcaggcccggctcggtgtgggtgatggtcaggaccacggagcccggcagatcgatgctcagcggggtgccgtcgtggaaggagaccaggcagtcagtgccttcgagcaggaacttggccttgtcgcccacgagggtcttcggaaccatgatctggtcgtaggtggtcatgtccatgaacacgaagttgtcgccgtcctcgtaggagtactggagggtgcggttgtccacggtctcgaattccatcttcatgcccgcgttgaaggtcttgtcgacaatcttgccggagagcacgttcttgatggtggtgcgcacgaaggcggggcccttgcccggcttgacgtgctggaacttcatgacggtccacagctgcccgtcgaggttcaggacggatccgttcttgatgtcgttagtagtctgtgccacgttattcacctatttcaaattcaaactagcttaggcaaagcccaaaaattgcctcggctattatgccacaccgggtatacaggaagtgaacgctggggtttcccacgtgcccccggctagactggatgaatatgcgatccttcttcgaagccatatccgtgtcctgcgtcgtccccgcgcaatcgccggcggacgacgaacgcacggtgttcgagaacctgtcctttgctgtggagcgcggcgagatcgtcgatctggtgggaccgtccggctccggcaagtcgagtctgttgaccgcgtgcgcccggctcaacccgcatgcgcacggcacgttcgccctcgacggcgtgggcagtgacgaattcagcgcacagcagtggcggcgggacgtctcctacctgccgcaaaaaccgatactgaccggcaaggacgtggccgaggcgatccgcctgccctggacgctcgcgattcgcggcaagggcggcaaggccgagcagctgctgcccgacgaacgcatccgcacgacgttggacgcgatgggatgcgaggacatcgacctggcgcgcgcgccacatgacctgtcgggcggtcaggcggcgcgcgtggcgttggcccgcacgctgctcaccgacccgaaggtgctgctggccgatgaggcggacgccggactcgacgacgacaacgcatccaaagtggccgcgatcatggcggacgcggccgcacacggcatggcgatcatccgcatccgacaccgtccgccggacggacgcgccacccgcacgctgatgctcgatgcgggacggctcaccgatctgacgcgggacaaggaggtgcgcccatgaacggcgcctacgacatcgacacctggggtcttgttctggcgttgggcatggtggccgcggcggccatcatcagcgaactcatgcatatgggcatcggcagaaccctgatgtggtcggcatgccgcgccctcgtgcagctgtgcgccatgggattcatcatcagctatgtgattcgttcgaacagcgtgtggatggtgttcgccctgatggcggtcatgctggtggcggccgtgcagatcgtgatgtcccgcgcacgcggcatccccaagggccttgccgggccgatcttcctgagcctggtcatcaccatgctgctgatgctggcgctggtcaccgagctcatcgtgcgcccgcacccgtggtacgcgccccagctggtggtgccgctgaccggcatgctgctgggcaacaccgtttccgcgcttgctgtcgggctgagccgattctatgaaagcatggaggaacgccgcgacgaggtggatatgatgctggccttgggggcgacggcatgggagtccgcccgtccatccgtcatctcgtcgattcggctgggactgttgcccaccaccgcttcgctggcctccagcggcatcgtgaccatcccgggcatgatggcgggccaggtgatagccggcggagatccactgaacgccgccaaataccagttcgtggtcttcggcgccatcgccgcgctgaccttgctggccgacggcctgatcatggtcatgatctaccgcacctgcttcaccgccgacgaccaataccgcccgcccaaagcgcgctaatcagctaagctccctctgataagctccctctgacgagggagctgtcgagcgcaacgagactgagggagagaccaccctacgcgatggtgaccagcgtgccgtccggcacctggtcatagaaccattgcgcgtcggccacggccaggcgcacgcagccgtgcgaggcgggctggccgagtttggcaccctcctccggcagatagtcgccgaaggcctcgccggtcggcaccgagtggaacaggtacgaaccgtagaactgcacccaatagtcggcgcccatgccttcttcggcattgtagaagtgttcaccgcgcgtatcgatggtgtacgagccgtgcggggtggcgtcgtcgacgccggtactggcgatcatcgtataaatggtctggccaccggacttgacgtacacccgttgtttggagagactgacctccacgctcaggtcggagtactgggataggtcgggctgtttgccggtcggccccttccagtccacgctttgcgcggctttgtcatcgccgttctgcgtgttctgcgtcttccgcgacccgccctgtttgccgctatcgggaacctgcttgcgggtaacggccgtgggctcgttcgccgctgcggttgcggcggcggatgcggtgtcggctcgcggccagctgcgctgcgccgccgcggtctcgactccggcgccgatcaggcagaacaggatacagcaggcgaccactccgcgccgaatcgcgtagacccgatcgcgactccaattcacgttcaacgtcggcagcctcaccatatgcctcttctcaccacaaagaccattcgggtcgattgtaaacaggcattgcgacgccctacgcctcggtttcagccgtgatctcgactgcaggaacggcatcgtccggggaatcttcgcccgacgccggcaccgtccagcgccgccgcagcagcatccacaggccgatgatcatggtcaccgcaccaagcccgatgccgaacagtcccgaggattgcgccgcgtgcgcggttccctgggattccaaaagcacgtcctgcgtgaccaccagcgagagcatcgcgtcgatgaaggtcacgaacttgaccgacgagtcgatgggattgtgcgttttgtgcgcaataaccataccgcgaatcgcaatcaagaagaacccgcaacttacgcagcagacggtcaagagcctcaaggaggcgttctggaagctgtacgagaccaagccgatcgagaagatctcggtgcgtcagatcaccgaactcgccggctacaaccacgccacgttctacctgtatttctcgtccgtgcgtgatatacgtcacgcacgaacattcgtcattcgtgcctcacgcctgcgcagcggcggcatccgcggcatcgtccttcagggcacgcagcagggacttgttgcgggtttcgatgatgcgcttgccgtcctcgccctgccaggagaagaagccctgaccggtcttggcgccaaggttgccttccttgaccttttcggcgagcagcgggctcgggccagtgccgttgtccatgtcgtcgaacaggtaggtgctgatgttgtagaacacgtcgagtccgccgaggtcgatgctggcgatcgggccgaccaggttccagcggcggccgaggctgtacttcatcacgtcatccacggtggccgcgtccgcgatgccctgctggacgatgtggaacgcctcgcgcagcacggccagttgcaggcgattgcccacaaagcccagcgattccttcttgatcttcgccggcttcttgccgatcttggtcatgaggtcgaaggtgatgtccaccaccttcggatcggtcttctcgcccggcaccacttcgaccagcggcatgagctgtgcggggttccagaagtgcgccaccacgaagcgctcggggtgtcccatcaccgactgcagcgcggtggggctcaggccggaggtgttcgtggacagaatcgcgtccttgggggcggcgtgctccacttcgacccagacggacttcttgatgtcaaggttctcggccacggattcgatgacgaagtccacgtccgccacgccgctcgcatagtcggcgtaaccggtgatgcgggccagcaccgcgtccacggtgtcgccgtccttgagcagtccggcttcggcgaagtcctcggcatccgaacgaatcgccttcatcgccttctccagcgaggcctcgccgcggccgaccagatgcaccggatatccggccaacgcgaactgcaacgtgatcgcgtggcccatggttcccgtgccgacgttcgcaatcgtcttgatatcgtccactgtctcaatcacggagaccccttctttccggcggttcgtctggcgttggtgtacgcatgaacagcaccgtgccgttatgcgtttgttcgcattctatgccgatttcgctacgtgaacatttgctgaacatttcgcggattcgactagtacaaatccccatatcagcacaaaagcgtggtgccgcaacaccgaagtgttacagcaccacgctgaaatgttcatgtcgttacgctgccatcgcgcacccacagcggaatcgataggaaacctcaccggagtaggtgaacacgggggcgaccagcatggacggaccgaacatatactgacggtccagcgtgcggcatgccgggtcatcggggaattccacgaacatggaacgcatgaccggagtaccgttcacatgaggctgcaggccaagctggtagacatacggcatgagttcaagcttgagcttggtgaactcgcgtaccacatccacggcggtctggccgggcaccaatgcgacgccgttcttctcgtcttcctcgtcgaacagccacggcacacggtacacggtggaaccgtgcagtcgcgagtgggagccgagcatgccgaacgccacccaacgcttgtagacggccgggtccgggaacgcaccttcgaaaccgccgatgtcgtgactccagaagccgaagccggaggaggtcagcgacaggccggcacgcagggactgggccatgccattgaaggtggattcgcagtcaccgccccagtgcacgggctgctgctggccgccgacggtggcggagcgcgcatacaggcaggcgttgcccttgccgtaggtttcttcgatggcttcgaacacggcctggttgtacagctgggtgtaccagttgtgcatggagagcttcggagagccgtcataccagacgacgtcgcgcgggatgcgctcgccgaaatcggtcttgatggcgtccacgccctgattcagcagggccttgaccttgtccttgaaccattcacgggcggccgggttggtgaagtccaccaagcccataccggcctgccagaagtcgatctgccagacttcgccattgggcttgcgcaccagatagcccttgtcttcgtgcaggcgcttcagcgtggattcgatgtcgccgaagaaacgcttgtcccactcgaaatcgcaccaatggaactcgcgcatccagtagcagtcgtagtggaaggcggccagcggaataccacgctcggccataccgtcgatgaaggagttgatgatggcctcggtgttctcggaaccgatctcaaaggagacatggccgcggttgttgaccagtacgccatacccattggaggtcatgtagaacgggatgtccttgtagccctgttcggaagcagtgccgccatcctcattccagatgtcgacgctctggccgttcttgacgtacgcgccgaagcgttcgcccaagccatacacgtcttcaccaaccgacagatgcagctggatggcaatgaacacgtcggattcatcacgggcggaaccgtccatggtcacaccgaattcgccgaccggctgggcggtgacgttcgattcggcaccgagcttgaatcggcccagcgacttgcctgcggactcagtgagcaccttgccgtcctcgccgatgaaggtcaggttccagggggtgcccttgacgaccttcgcggtaagtccgccagtggtcagcgtgacgtccgcgccattgacgccgacttcgccgtcgccattgccgttcgcctgaacggtcacgtaatcacggttgccgggttcgtcggcattgagcgggaatccggggtattcggtggcgccttgccagtgttcggcacgcacacgaatcacgccttctgccggcgtggtgatgtccacattgaatgtgggcaggttcagggtatcgtatcggccgcgcaccacggaggtcggggcgaggacgttgaggctttcggtggtggcatccgccgccagttcgtaggcttcacgagcgtagagggcgtcgacgccgtcacgaatcatccagtagccgttggtgaacttcattgctgctgctccttggtggagaggtggtttcgaccgccagggaacaaggcggccgaaaccaaaaccaatatgtactgcttgttgattgaattgcctgttgtgcgaatgaccttacttcaccgcgccggtggtgataccgcaccagtcgccggagcccatcacgccttgctcaccgtacttgccggtgtcggccaaggaaccggtgataatcttgtcccagccatattcggacacgtaatcgttgaggttggtgagcaggccttggctggcgagcagaccggacgtggcgttgcccttgttgtattccataacgtccggagcgtcgtcggagttgaggatctgggaggcgttctggcgaatctgttcgaaggccttcttctcgaattcgaccttgacgccggtctcacacattttcatgctttatgcaaaaaatgtgaggcatacgcacatttcccatcaaacgcacaggtgcaagaatggcagcaattcgccatttttgaaatcaccatgtgcgtttgacggcgcgtaagcctcacattgttctcagcaggaccgaatttctgtgagcccccctatagcgctcccctacgcaatatgtccgcaaacgaccacaccacatgggcgatacgcgccaattcggcgtaacggccgatggacagccactgcacacggtaccgttcgaaccacaactccaaatcggcggcaagacgggcgcggcgcgaggcatccagcgcacggccggtcacatccttggtgccacaggcgtcctcgccgccagccaataccagcagttcctcacccagtctattgaacaaccgctgcccatccagcatcacccacagcagctccgggttcaatcctcctcgtgccgagccatcgagcaccgcgacaaccgcactgccgcaatcaatcaacgcccggtcgcaatcccggcgtcgttcgagacgggcatggttccgcaggagcagtcggcggcgcgcgtcggcgcatcccagcgcacggtcaaacatgagctctcccccgcacgaccgttccacatacgatgccacatccgtattcagcatgccggtgccggaaccgtattccagttccagcacttgcacggcgaggtcccaggggaacgacactccatcggagtcgatgcgagcgagtgaatccataagccaaccggattcgtcgccatacgccagattagaaatccgatggttcatttcgcatgcgtcaattgcaatcgggttccacgcgttttgcgcaccgtagcacagtcccggcacgctcaaccgcggatcattgacatgcccatagtcaccccaatcggtgaccaccatgccttccgcaccatatttgagcccagccaccgccatgcggtacgtgttcagccaggcaccgtcatagtcggggaagaaccggctccacgcacgcacggcagggcacacgaattggcggcggccttgtgatgcgatggtctggatcttgctttcgtcgatatccggctcatacatccagttgagcatcgtgatgtcgccgggcagcaagtccatggtgtgcggattctcgagcgcgatatccgcccacagcatcggttgtagaccacgatgggcaagcgtgctgcataggtctttgacgaaatcggcatacagctcatcgcgactggcgcccggcgagtcctgtacggaccggccacggcccaagtcgaaagtctcatcgccaccaatattgaaggaccgcgagcggaacagcggcgcgtattcctcgattaggcgcgaggcgaaatcgtgcgacttggggttggctgcgttcagtgtgtggtgttccattcgttcgatgaaactgaacggacggtcggcgtcttcggggaactctcccagtccacgatgttcacgggtgcgcaggttcatatacatgtgcccaaaagtggccaaggacggcaccagttcgatgccgtggtgtgcgcagtattcgtccaggaacatgatgtcgtcggccgtgagcgggtcagtgccgcgccacgcttcgctgagctcgccgaaagcgaaggcatgttccacgtacagctggaattggttgtacttatacaacgccagctggtcgatgaaccaggtgaggaacgccatcgtcggcacacgcccgcgcgtcacgtcaagactgtaggcgcgcaccgcgaacgcaggcttgtcttggatatgcaggcagggcaaggtccgcgaggtttgcctgatcatctgccgcagtgtctgcatgccgtaccgcaatccgctttcgctgccaccacgcacggcgatggtatctgaggcgaacacatccagcgtgtattcgtcatgcgccaatcgcgcatccacacacagcgatatgacggtgccgttcatcgctgccggcgcacccgcgcccgcacccgcacccacgcccgcatctcgcgctttttcggcggcattggcaccggcgtcggcttcatctgtggctgtgaggactcggcgcgtacggacggcgacgccgcagtaacgctcgagttcgctggacagctgctcgattggcagcgtttcccaggtctcatcggcatcttcggtgacggcatattcgggaattcgtttctcgatcgtcaccaaggacccgatcatagccgtgccatgcgtgtattccaatgtcaccggagcgggaatcagggtgagacacggcgttgcggcatcagccttatattcgaatgtgggcacagctgttcctttcatactgtttttattatcgttcatccgctgacggcaggcgacacgcggtcacgccgccatcagcggacgaatcgtttggtgaggtacggcggcatacgctatttcacggcaccggtcgtcacacccttcatgatgttgcgctggatgagcatgaagaacaccaccaccggcaacgagaaggtcaccaaagcggccatctgcccgccgaaatcggtgcccatggtgggtgtcgagaaggacgacagccataccggcagcgtgtacttcgactggtccttcatgaacgtatgggcgatcatgtagtcgttccaggcgttgatgaacgcgaacaccgaggtcgagacgatgccgggcgcggccagcgggaaggtgatcttccacaggatctgccagtcgttcgcgccttccacggccgcggattcgaagatgtccttcgggatgttcaggaagaacccgcgcatgttccagatcgcgaacggcagcaccatggcgatgtacgccaggatcaggccgctgtatttgttgagcaggccgagctggttgtagatgatgatctgcgggatgatgccgccagaggtcatctggatggccagcacgaacaccatgatcggcttgcgcccgcggaagcggtacagggtcagggccgtgcacgcgaagaacgcgacaataatcgacaggacgatcgagaggtgcatgggccagaacacgggggtcgtggtcatgatctcatcgcgcggctttacggcggtgataatcatccagtagaccgggaagaaccatacgacgcagaacagcagggcgaggatagtggtgccggcgcggcgcgcgatcttgccggggttggttcggcggcggggcggtgcagactgcgctgcgccatgcgatacggcccgtggattctcaacacatttcataaggacgacccgctatttcagggattcgccaatatcagcgtgccagtcgccatttccggcgtcggctatggcagcgccaccccttccccaccgtcgacatcgacaaccgactcgcttcacgcaagctcaccgagcatatgttggggcgcgggtatcgacgaatcgcctatatcatcggaccgtcgtacttgccgacgtcgacgccgacgccagcgtgcccgcagctgaccaccgaggtcgtagccagataggcgcgcagagaacggttctcaataatgtctgtgcacacttctctacgcccgaagcacacatggaatatgccctaatcactgccatgtcgccatttgcgatgatgtgagattgttatgttcttgttcatttgagcgcacagatactactgagaaccgttctctgcgcaaatagacaatgtggataactccataagctggaaccacattgccctgcctggcttgcattcaagtccaaatcagctttacggtcgcaccatgagctcttttatgcatgaggatattgtcggccgacgccgagcagaacgtgaacgctgcaatgatgctgcgcgccgttcgaaaggtccattgctggtgggatacatcaatgcggccaactactacggcgcgcccatcccccgacattgcacgctatctgttgatgccgtgcacgcctgtgtttccagtgccaacaaacgcagacgaatcaaaggcgtggtcttccatgtgtttaagggaaaactggatatccgcaaaaaggattatgaacagttctggattgcctcgccggtcatgatgtgggctcagatggcccaatactctacattggaggaacttgcggccattggagcctctttgatgagccgcgataaacggcgcagaatggccactcgcaaggatttcgatacttacttggaaatcagtccgcggttcataggtcgtaacaaatgccacgaggcactgccctacatgacagagaacacggattctccgccggaaaacacgctgtttgggatgctgaaggattcaggcttgggatgccccaccgccaactatcgcgtgaatatcggcaactcatacgtcatattggatatggcatatccggactgccgcgtcgcgttcgaatatcagggagcctatcacgccgatccggcacaaatgcgaatcgacgcggcaaagcgaaacgcattgcaactgctcggctggatcgtcattctcgtcactgcggatgacctgagaacagccgacacgcggcatcgttttatcgagatggcccatgtcgtggtgtcccggcaacgcaatctcgccgattggaaccgctcatgggccattacctcttagcatcgcaccgacaatgcgctatgccgttatttactgcgaggcacccgccagatatcgggctcaacgtagatctcccattcataccaaggcagcgcggcacggcgtcctcgtccatgtgaatggcctgcaggttaatgagcctatccacgccgacagtgcgctccattgcctcgaccaccaggtcgcgggtgctgtggtcaagcgattcgcccaccagcagcgaaccggacttaaacgccaacgccgcctacaaaagtgtgaggctgcgcaggctcacactgccaacagccgttcagccaaccctcggaaggtctggccaatgccatccgtacgcaaagcgccgtcggcgtccagcaccgccggccggccggcctcgccggtctcgcgcacttcgggttccagcggcagctgggccatcagcggcacgtcatagcccagcgcctgagtgagctgttcagacacgcgctgaccgccgccggcaccgaaaatctccagcttctcgcccttgtgctcgtagtagctcatgttctccaccacgccacgcaccttcatcggcacctgcagggccacgagtccggagcgcacggcgatgtcagaagcggagggctgcggggtggtgaccaccacgagttcggcgttgggcagcgcctgggccacggaaatcgccatgtcgccggtgccgggagccaagtcgagcaagaggacgtccggctcgccccaccatacgtcagacaggaactgttccaaggagcgctgcagtcgcggcccacgccacagaatcgcccggtcagcaccggcgaacatgccgatggagatcagtttcacgccccacgcggtgaccggcatgagcatgccattcagattggtgggctgtgtatgcacgccgaacaggcgcggcagtgagaagccataaatgtccgcgtcgatggcggccgtgtcgaagccgagggccgcaaacgtggcggccaggttcgcggtaaccgaggacttgccgacgccgcccttaccggaggcgatggcgaagatgcgggtcttgacacccggtttgctgaaggggttctgcttgcgttcggccttgaggtcggcgaccagatcggccagcttgtcacggctcatcgaaccgacttcgatatgaggcagcagctgtgcgcccggataggagctgaccgcgccattgatctggctggtgatggtctcgctcagtggacatccgggaaccgtcagctcaacgtgcacggtgacgtcgtaagtgccggcgtccgacgatgcgggcgcggcttcgatggcggcaatcatgccgaggtcggtgaccgaacgaccgagctcggggtcgatgaccttgctcaggcgttcgtagatgtcggcttcgatctgacgtgcgtcgctcataaatccgtatcctcctttagggcctgttctaccctagcgtgtgatgcggcggcatgccagagggagtggagtaagtcacactggggcgggattcgctttttctctcccccagtcagcctaaaggctgacagccccctcatcagagggggttaatgaagcgtctgagggggctattttagatggtgccggtggctaggagctgggcgaattgggtttcgctcagcatggggatgccgagttcctcggccttggcggccttggagccggcgtttgcgccaatcaccacgtaatcggtcttcttgctcaccgaaccggccgccttgccgccgcgctcgataatcgcctctttggcggaatcacgcgaatagccctccaatgaaccggtgaccaccacggttttgccggccagcgtctgcggcaacgaactggtctcggcctcgtcgacgcccacgccggcggcctgccaagcacgcaaagtcgcgccgcgccagtcgccgggttcgcgggtggcggcgaaccagttcaccaccgattcggcgatttccgggcccaccccgtcgatggccgtcagatcttcaatcgtggcgttttcgatggctgccagcgagcccatcgccgaggcaatcaggcgtgcggtaggcggaccgagccggcgaatcgacaacgcgaccagcacacgccacaggtcggcgtgacgggccttgtccatttcgtcgaacatcttgcgcgtgttttcgccgggccgaatgatcaccggtacatccgtgacgccagtgcgcgtggtcttgtgatccacgcgcacgataaccgcgtcggccggcacgtcatactcaggataggaggctgcggcaaagcccggcatagtaccaagtggagcctcagccccggtaggtgcgccggtcgtctcgctggcggtatctccctgtgtttcggcagattcgattgcggtctccccttgcgcgcgttcgaccagctgcttggccgtgagctttttggccggcgtgggcgcggtccagaaggcaggcacctgatgccacaggccagagccgccgacacgcttacgcacctttttcttcttaccgttcgcaccgaccgtctcatgcacctcgacgattgcggcctcacgccacacgcgcacgtcgcgcagatcggcggcggtcaggttgaacaacccggattcgttggacaacaccggcttctgcgcggccggcaattccagcccttccaccggctcgtacgggtcaggctcttcgccgggggcgaccagaacctcggtgatgttcggcgcgtaggtcgccaccgaatcaggccggttctcctccgggttggtcagagcgatggccgattgttcgcccaagtgctcgatgtcgaacgccttgcgtgaggccagcgaaatcacgcgctcggtcaactgggccgggcagctctccacattcgggcagcgaatgtccttgtccccctccttggcgggtgacagtttcgcgccgcatgaagggcagaactcgggcatgacgaattcgcgcagctggtcctcacgccctttgcgccgttcaagcaccgggccgaccagttcgggaatcacatcgccggccttgcgcaccaccacggtgtcgccgatcagaatgcccttgcgcttgacttcaaatccattgtgcagcgtggtacgagccacggtggagccggccacgtagacaggtttgagcacggcgaccggcgtcacacggccagtacgccccacctgcacggtgatgttgagcagttcggtgttgacctcttcgggcgggtatttgtaggcgatggcccagcgcggcgcgcgcgaagtggcgccgagggtacgctgcaggcccaggtcatcgaccttgacgacgatgccgtcaagtgcatgctcgatgtcgccacgatgctcgccgtagtactcgatcatgtccaggatctcctggaatgaggtcaccgcacgattgtgcggggagaccggcacgccccacttggtgtatagatcgtaggcctgcgactggtcggcgaccacatcatgggtgccgcgcggatggtccggcccccaagtgagctgccccagaccatgcgcatagaagctcaggcgacgggtggcggtgatgcgagggtctttttgacgcagcgagccggcggcggcgttgcgtgggttggcgaagggcgctcgtccggcgtcctcctgctcgttgttcagggtgtggaaatcatcccaacgcatgaacacttcgcctcggatttccacgaagtccggaacgtcttccttggggccgccgaggttggcgggaatggagccgatggttcgcacattcagggtgatgtcttcgcctgtaacgccgtcgccgcgcgtcaggccctgttcaagcacgccgttgcgatagatgaggttcagggcgaggccgtcgattttgacctcgcagctcatgggcaggggcttggattcaggccaatcgaggtcgcgaatcaccgagtcgtaccaatccttgagttcttcgatggagaagacgtcgtcaaggctcatcatgcggctggggtggcgcacggaggtgaagtcgttggagaaggagccgccgacgcgatgggtgggcgactgcggattgtccagtgaggggaacgccgcttcgagtcgttcgaggcaacgcatgcgcgcgtcgtaggcggcgtcggagctgacgggtgagtcgtcgatgtagtaggcgatctgatcggattccacccatgcggccacgcgagcccacaggcgggcggcggcctcagcggtcatcatgttcacgtcgaaacggtcgaggcgtatcgcgtcgtcgtcagtgggctgcagtgcggctatccattgttcggagccaggggcaaaacgtgcaataccggtatcaggccggaccgcggccacatccccatcgtcgaaatcccatgccagttgttcgttcgtgctcatggttgtctatcctagcgggctcggctcccctcggccggctataccgtcaactcccctcaggcggctatgcggatagcgagcgcaggaactgggcttggatgatgtcgatgttatcgccttcgccgtcattcatgcgggccacagccaccgagagcgtgcgggccggcacgaacatgccctcatccacgcacacgcgagcggcgtcacgcacgatgtcagccacttcgatatgcggccagaccggcagatcatgcgtggcaagcacatgggcggcggcctccaccgattcaggcaccggtatgcactgcgagtccgcacgggaaaccagttcctgcagttcgctttccagcgaaccaatggccccgggagcgatatgatcgctcataatgtaggctgcggcggctgtgtcgaaccggtcgagcatccattcggcgtacgcgaaccggtagtaggcgaacgcggcatcgtcgcggtccaaggccacgcgcagagcattcaggcaggcggcgcgtgccgaatcccaatcctcattgcgggccagttgaatggcgagcttcagatgtgagagcgggtaggcgggcgcgtacgccaccatacggttgagatgcgggatcgccgcctcggcacccttgatctggctcaacacgtcagccagctccatgtgcgcgtagaacagattgtccgggataagcaccgtacgctcgtccaatgtggcgaacagccggttgtagaccacgcgctcggcataggagttgaagtatcgaggtacgccatggcctgccgcatacacctggtccaaatgggccacggccgcttcggccgcttcgatggcctgatcggcttggcccgagaacagcatgtctcgggcacgcagacgctccttgtcaagatcgtcggcaagcgtgaacgtgaagtccggcgtgtccttgccatcgatcaacgcactggtgacctgagaggccaaatcggtcagttcgggatcgcatatcgattcgatgacctgcatggctcgctgggccttttccacggagccgagcgacgtgttcctggcgatatcgtggaattcgttgacgccatgctgcagcaggtccactcgctggatagccagtccggcactattctgtgcgcccagcacgtgagcggtcgccgggctgaattgacggtcggccagttcgggctcctcctgggatccggtgggagagaaccggctgtccgccaagtcgaagtcggcgctgatgggtttcagaccaccttcgccgtccacgtccatcacggcaccgaacatgcggtaggtttcctcgggattgtcaagcccagcggtgtccagtcgcttgaggaaggcatcacgggtgaaggtgacggtgaccatattgcgcacggtgggattgcggcgcagcacgctcatcggatcatcgtccatgccggcggccccatcagcaccgtcagtgccgacgccctcgccgccgataccgcccaggtcgtcgcctgcgccggtatcgtccggcatgccgaacgccatttcgtcgatatcgacgcccttcatcaggtcttcgaactgcgaatcgatggacgcagcgccatcggcgtcagcggattcggccgcggcctgatccgtagcatccgcagacggtccggtaccgttgcctgctcccccggccgtgccacgttcgtcaccggacgccgtctgcccgaacgtctcctcatgggtgatggggcgggtcgggtcgccatggaaatcaccatctttggggtcggctttggaacccacacgccccaaatcgccactgcgtagatgttcgaaggcgcttagggcctcgctcatcatcgcctcgatggcggaatcctgttcggcaatcgcctcttcaagaccaatggaatcgatgtgcaacgacacctggcgcacggattcgctggtgccgaaacttagcgcggccatcatcaggccgacacgcaggttgtaggcggcgctcattgacgcgcgttcggcgctactcagcgcacgccacgtacgtcgagtggtgtcataccggctatcgggcatcatcgaggtgccggcggtggtgaagccaatggccacttcacccgaatccaagcgcgaccggaactccacgtcaaaccgatacggcaaccgtaaccggcgcaacagtgaagagagggtctgacgatacacccattcgtcgctcctcgccggcgaatacgaaggacgagcggcttgagtgttggtgtcgctcttatcggtccgttctacagcgccctcagcactctcagtactttcagcgcccgcagcattcgtcacacccgaatccggcacgttctgctgggtcagcacatctcgaggatcggggaattcactgcgaatctgtccagccgtgcgtgcggcgatatcgaccaggctcagcacggcccgacgctcctgctcgccatcatacgggtcaagcgccataatcgcagggttttcgatgagtttcatgtcgatttgcgcggcctcggcacgggtcaccgtatcttccgtagggttgcgtcccaaggaagcgttgcgctccaaccaagcgctcaccgcagcgaatcggttgaggttgccttcgatcttcaaggatttcagcgcctgcccgaatgccaaggacttatcccacgtaaagaaatagccgctcgaatacgtcgaggtgtacaggtgcaatggttcggcgccatgcaccgcttccagtcccggcgtggtgtcgagagcgccggcttcgcgcatcagatcggcgaaatgatcctccagaccggaggcccgcatgccgtgggcacgtgccgccaaagtgtcacgcaccgaacgtcgaatcgcaccgattggcgcctcacggttgagacggcggaagatattgccggaaccgaatccgatgagcagaccattgatctgcggcaacatatacgtggcgaagaacgcgatggtaatggcatcgcggtattccaaatcatgacgcatctcaggcggcagattggcacgcatctgctcaagcgtgtaccggttgccggccttgagccatgaggcgagccacgtcatgcgtccggtgtcgtcacgccccaccacgccaccggtaatggccttcacaccgtcagcaccatgaccaaggccacgccccaaaccacgcccatgatgcagcgcacttcccaagccacggcctgcacaggagaaaccggaacgtgaacgcggctcgtcgctttcgcccagccgctcaccgtccggcaaagtcacttctttttccttgccgaacatgaatcgcgcctgcatatcctgcacgtccatgtcggtgtcggtgcccacgaatacgcggccatgcgtatcggcgaacgccacctgcgcaaaatgatcgcggtcggggaaaatgccaagcgagaagccgcggcctctggtggagggcagctgcgcccatccaagcaccagcccttccggcacgttctccaattcggggaaggtgcgtcgcttgattacagggctcagcgccactgcatggcgagtcagttcgtcgataatgccgcctttacgctcactggtctcctgcaaggcatcgccgaacggattcgtatcgtgcttcttcggcttggacagtcccagatcggccgcgagcgcgttcatcgaatccttcagtccgcccagcagtggcgtgcggttgtgcttcccatggtccgatgtacgttttggcatgattcacattgtctcttgtttgcccgacatcaagcccgaataaagcctatagaataaatgcgtgcattccatagaccacactcgcgcagactgtccgatgccgtcgaatcatgaacggcgcctgcccagccgtccggatacccggcaccggctgcgtttggtgcgcctgctgatcgccttgctggccgccatcgccgccatcgccgccatggagtgcatcgtgttcaacctgccgttctggcgtacgctcggagcgagcacggatacgaacgccgtgcataacacgctgggttcgggtctcacgcgccggaatgatggcatgttgaccgtcaccgatccgaccaaggcctatcttgaactgaccgcggacggcacgtcggattacctacgcatcgataccgcgagcagcaaggtcatcgataaggcccgtgagcaggccgaggccgaatccgaagcgaacgacgataaggaagtcttcaaaccgctggcgaccattcatgtgcgcgcggatgtcgatggcatcaccggccaggcccagtcgatgaatcccgacgctattcgcagccattatgtcaaggcaccgggtgccggcatcgtgcgtatttggattcaggaagagcgcggcgcgatcgtaccggtcaccgactcccgcgccaacgtgcgcgtaccgttcgtcatcaattggatgcgcgtgctcgccatggccttggtgttgctgatgattgccgtctggaggccgggatcgcgcctgtggcgtatcacgcttgacccgtccagcactcggcaacgacttgctttcgtagggcttatggcgattcctaccctgcttatcggcgcatccatcatccacgaactgtggtacgcgtctccgctcgtcttccacgtttccggcgattacacctatgatttcgaccagtatgggcatgtggccgatgcgctggtcgccggccggccctggctcgacttgccggttcccgaacaactggccgccaccgagcacccctatgacgtagccacacgtgcccagctactcgccaatggagccagtccgctctactgggattacgcgtattatgacggtcactggtattcctattttggcgtgttgcccgcagtgctgctgttcgtcccctatcgtctgctgaccggtcataatctgccgacatccgccgccgagtatattctcgtgctgctgttcatcatcttcttctccttgctggtgctgcgcgtcatccatcgcgtgatgccgaagacttcggtggcggccgcgtcgttagtagtggtctcatcgttggtgagcgcgcaagtggggtatttgctgtatcgcacgaacttctatcagataccgttcgccgcatcgctgacgttgacgtcgctgggactatggctatggctcggcgcggacacgtcccgccgtcctctgagaccatcggaccgatggcaggcgggcgacgccaagcctctctccctgccacgactggccttgggcgccttgtgcattgcggcgaatttcggatgccgaccgacgttcaccttgaccgcattgcttgcgttccccctgttctggccgcagattcgcgcgctgggcaccggtctgcgcacacgccgtatcaagccgttgcaggcgttgcgcgcgccgctggcggtaatcatccccgccattctcgtcgtgacgcctctgatgacgtggaacatggttcggttcgattccccgttcaatttcggcaatgcgtatcagttttccatatccgatatgacccggcataccaccccgtccgcggatatgcccgccaacatctggtattacctgttcctgccgctgcgcttcatggatcgtttcccgtggctggcgggctctcccgccccgatgccgcaatggggctattacgaggtgatggtcggcgcgattttcacggccacgccactgaccttgatggctttggcgctgcccctgctgcgcagattggagacgcacggcatgcggccatggctgatgtcttgcttggccgtggcggcggtgctggtcgtattcgacagccacgtcggcggtttgggatggcggtattccgccgatttcggctggctgatctcgctggcgtccataccggggctactgtggctggtcaatgggcgcgaaccgagccgctcattggcgggggccaacgacgccgcttcaggcgatggcatcgcccgcgtcactccgtggcgttggctgatgcgctgggtcgtgatgctggccgtattgtgggcgctgggcatagccatactaagttgcttcgtgcagtcgcgcagcgattcgatgatcgccaacaatccgacgctctggcatcaggttcagtcttggttcaccctgctataggaccgggccgctcggcgacccgccaagcttcagtattctcccagcattccggccggtgttttccaagacctgcggcataatgtatgtgacgtaattcactaatcgtttacccatactgtcgtgagggtttccccgtgtccactgccgtccgtagtcgcgtcttcaaaatatccgcagcagccgtcaccgccgccatcgccattggtctgtgcctgttctcacaggacgacgtcagcgcctccatcaaggaacgccgcgtggagcggctcaacgcccagatcgagaacgtctataccgacgaataccagcagatgatggacaccgagatcgccgacgagcgcgacgccaaagaacgcacggtcgacagcatctacaccaaggtgaacccatacggcaccaacaccacgtccatgtacgtgtacttcaccaccgatcaggcctccaccgtcagctacaccgtttccgctgaggggtacccggattacacggccaacgccatcaccagcgatgaggcggccgccgcataccgtgaggccgccgccggcgacgccgacggttccggcaatgtcggcggtaccagcacggcgagtcagacgaccacggtatcgagcaatgacattgcctccaccgagcacgagtttctggtgttgggactgatccccaaggtcaagaacaccattaccctgaccatcaccgacaccgacggcaacgccaccacgcgcaccatcgagcagaccggcccgaaactgctcggcgaggaggaagtacggctcgaacaggccgtcgcccccgacgaatccacggtcaccacgctcggcaatggcctgtacgcgattctcggcaatgattccaacgagcaggatttcatgtactactatgacgcgaacggtgtgattcgcggcgaaatcccggtgctctactaccgctcgcaccgtctgctgttcgacaatgacggcatcatgtggttctccgcctccaccaagcatttcgtcggcatgaatcgtctaggcaagctggtcaagatcatcaatctgggcgaccagtacatcctgtaccatgattacgcgctggattccgacggcaatatcgtctctctggccaccgatctgaaacattcggaccatgccgtgcaggatcaggtcatcaaggtggacaccgactccggcgaggtgagcctgctggtggatttcggcgacctgttccccgattacaagcaatccaccgatcattccggcatcgacgaatccgatccgaccgccacgaaccgctgggactggatccacttcaacaccatccagctcatggatgatggctccgcgttgctgtccgcacgtgagacctccacgatgatcaagatcaatgacatcgaaggcacgccgtcgctcgactacatgatcggcgagccgagcgtatggaatggcatggatgcgcagccctccttcctgaccaaggtgggcgatttcggcgacaccggcggccagcactcaatcactgtgcagtacgattcctcgctggaggacggccagtactacatctacatgttcgataacaacttcggttatgccatgacccgtcctgatttcgattggaccgtgatcgatggcatttcgaccgcgcagagctccaaggatgagaactcgaactcccagttccgcaagtacctggtcgacgagaacgccggaacctacaccgaagtgcaggacttcgatgtgccgtattcgccgtatgtctcctccgtacaggaactgtccgatgacctgaacctggtggacaccggcatgcagggcctgttcggcgtctacgatgacgacggcaacctcaaggcacagtacaagatggtgctcagttcgggatacatctaccgcgtctaccagtacggcttccgcggcttctacttcgcgtgagccttggcatcgacctcacggccgatgccaatcccccaacggccgattcctatctgctaccgcttcgcggcctcatacttgcggcgaatcagatcctcataaaacgccacagcctcagccggcgctccgtcaaacgcgaccgcgtgctcatccagcaccagtacacggtcgatggcgtattcgggccggcggatcatatccgtgtcatgcgtggcgaaaatcacctgcttgttgtagctgaacaacgccttggccacatgcgcggtgccaatctcatccaatcccttgctcggctcatccgccacaatcgcactcggctcaaagctcagcgcggccgcaatagccagcaggtgccgtttctcggagtccagttcgctggccttggccttggagacctgcgccaaatcaaaatgcgcgaacagattgccgatgcgcgcatgacgttctgactcgggcaccttgtgctttttcagcgcttcggaaacagcctcggaaatattcgccgcctggtaaaagctgttcggaatttcctcgcggcgaactttgccgaccagattatcgatgcgcttcgcgtccttcttcagagccgggtcaagacgttcctcaccgcccgcaatggtcaccgtgccggcgttggccttcaacgaaccgtccagcagacccagcaatgtggatttgcctgcgccgttcagtccgatcacggccacccgccgctcgctgatggtgatgtccgtgggagcaagtcccacgtgcccatcatcatacgtatgccctgcctgatccaaagtgaacgtcagcgatgccgggcgtggcagttctttcggtctaaacaagaatcccatgccgctattgtacgtggagtacaggtgtggtgccggcaaacaccggcctatcgcagcaaagcggcgacggtattgagcacggcgcggatgccacgctcgaattcgtccggttcgggtagcagggaaacggccaggtatccattggaagtcatgtcgaagaagtagccgggctgtccggtgagttggtgctcgtcaatcaaccgcagcaccagttcgttctcatcgatgactgaaggcactcgtagcagcacgttccagccgccttcggcccgtagcacgctgaccagcccgttgggatcggcgtcaagcaactcgtgcaacttggccaggttattgcgcacgcgttcccccacccgtctggtctgtgcaggcgcggcgttcaataatgcgggaatccgttcggcaatgatgtcactcatcggcagataatcgtcggcgatgacgtccagtcgacgctgtgcctcggtaacgtcctcggcaggtccggacacctgaatccacccgactttggcgtgcggcgcggccagcattttggagaatccgtctagggcgaaggtgagcacgccacgctcccccgcaagccgtgcgttgtcggggaaaggttcgagagagtaatcgaagaacacttcatcggcgataagggcgatgccatgttcacggcacaatgtcacgatacgtgcacgctcggttggttttacgtacgaaccggtcggattgttcgggttgatgagtaccaatgctctgacgcgttcgccaccgggctcgctgagcagccgctcgagttcggcgatgtcgatgaaccaggagccgtcgaattgcaactggtattcgaccgtgtcgacgcattcaagccgtgcaatcgactcgatcagcggatagccgggtttgggtgccagcaccgcgtcgccggcatcgcaaagtaacttgatcagccacgaatacgcctcggacgtggagctcagcaagtacaggacgtccgggtcaacgccctcgatggcggtattcgcattgttgaaagcggcatggcgctcgttcccgccctcgatggcggcgggcgaagccaactgagggctgcttgcgtctaccgcctttgccgtattgaggaatgcggccaatgcttctcgtgccgcacgcggtccacgtgggtcggccgtatacacgctcggcaccaattcgggtgccagcccgtggcgggtcggattggaatcgttgagtttgctgagtgcgatgccgtttgccttggctgccgcctcggccgccgcaatgggattcggcgcagaaatatccacacgagaagagaaatgcacgctcataccctcccacgatagagcgtggtgccccctgtcccgctctcaatcgcgcaacattcccggaaatgcgtcgctctggacccgaatcacaccctcaaacgcggcacattcccgggaatgcgtcgccacagacctccatacacacgctcactttgcgcaactttcccgggaatgcgtcgcatacctttcctatgcaatgcgaaaggccgcccgactagtcggacggcctgaagcatattcgcgggtcagcgctgcacacccacgctcactggctcactgctgcttggtgctggcatagtaggcggcaccgacgatgccggcctggttacgcagcttggcgggcacgatcggggtcttgatatccacgtacggcaggaacttttcgctctgacggctcacgccgccgccgacggtgaacaggtccgggttgaagtacttctccatgaggccgtagtacttggtcagacgcttggcccacttcttgtagcccagttcctcattctcgcgaatcgcggaggaggcatacttctcggcgtccagatgcttggcgctcaggatgatgtgtccaagttcggtgttcgggatgagcacgccgttgtaaatcaaggcggtgccgatgccggtgcccagtgtggtggcgatgaccagaccatcctggcccttggcggcaccgaactggacttcggccaggccggcggcgtcggcgtcgtttaccacgacgaccgggcggccgcaggcttcggagaacacttcagtaacatccacaccaatccaagactggtcgaggttagccatgaagtcgagcttctggccgggcttgatcggcgcggggaaagcgatgccaacgggtgcggattcaggcacttcgaagtggtcgagctgctgcttgacgattttagccacggcctgaggagtggagacctcgggagtgagaatcttcaatcgcggctcggcgaaatcgcccttggtcagatcgacaggtgcggccttgatgccggaaccgccaatgtcaacaccgaaagcctgtgcagtttcaatcatcgttgaccttcctttccatacgttttcatcagttcgtaaggttgcgccccagtttaacgcgaattacgctcaacacgaaaccattacacaccaatcatgcaaacgtgtgcatcgtcgccggtcactacgtaccctattcgtatcgtttttcaagcctgacaatgggcaatgcatgcgatttcgcatactaggaaaaatcggcgtctatggcggactgactctgtgtcgcgcgcgataatgagaggtatggcagaacatacccaacttattgatgcaattaacatccgcaccgccgtacgcgcctacgatgatgagccgatcgacgacgatacggcccgccagttcgagatggcgcttcagccgatcaacctactcggcgatctcaacatccagctggtgcgcgaccagcccaaggtgttcgccgaagccaatgcttcaggtcatctgaccaatgcggcgaattatctggccatcgtcggccccgcgaacgatgcggaagccaaagagcgtgccggcttctatgccgaacgcatggtgctcacggccacgttgcgcggcctcggcaccttatgggtcgccggctcatgggacaaggcggaggcggccaagcattgccgcgtcacctctggccaggagctgtatctcggtgtggtgatcgggcatccgaagaatcatctggattatcaggcgaaatcctatgaggagctatgcgaagcgcaacgcacgcaccgcgccaccaagacctatgagcagttcaccgccacaatgagcgatgaggggcgcgaggccgctccggattggttcaagtccggcgtcgaggctgcgatgaaggcgccgagcgcgatgaaccgtcagccaatcaccttctcgtataatccggccgacgataccgccgccgcgcatatcgatcagagtgcgggagatgagcatcacgcgttcaatgacatgggcatcgccaagctgcacttccagatcggtgccggccaaggccagtgggcttggggcgacggtggcctgttcatccataagtaacctgtagtgacccccctcatagaggggagccactactacggctacttcagcgacggcatgggcttccaggtggggtcgtgcatcagcttgcgcgagtcccaccagcccttggcaatctgcaccaaaccggtcttgaggtgctcgcgatccaccatcaccaggcggatgacttccttggccgcggtgagcacggtacccagtccaaacaccagcggacggaagtcaccataggtcatgaagtaccgggccatgtatccgcggttgcgcatgatgtgataccggttcatgtcggatgtggagttgagctggcgcacgccggcgatatcccaattgccgatttcgcgcgtacggcgcaggatcacgtcgggcaccacaatcgggttggtgaccttgctggcgcggtagccatacatcgtgtcatcccagtagatgaagaagcgcgggtccggcagaccgatttccgtaaccacacggcggttgaacaggccgccttcgaagcacagcgtgtccatcactcgatacccggccggaccaaatgcggcgggcgcaatcgggttcggaatgcccagcggcacaatgaagtcgtactgccagtagaacgggccgccatcgtaatcgaatcgggatccctgaatcacctcgtgcttgtcggtccacttggacagcttggcaatggcgtccggcagcacggccacatcgtcgtccatcacccagaaccatgcggcacccagctcgtaggctttggccacgccggcggagaaaccgcccgcaccacccaggttctcggtctgcggcgcatagaccacacgttcttcgttaccggactggtcggccacggtggtgccccattggccggtcaccttgccggcaaacgcagcgaccatgtccgccgtctgatcggactgctcattgtccacgatgacaatgcgccacggtgcctgttcaagcgccagaatcgaatcgaacagtgtctcaagcaactgctgacgtttgtaggtggtgacgatcagggcaagcttgtcgatggtgttgttgggtttcttcacttcagccatggctcccattgttgcacttgaccggcacaagacgaatttctgcacagtgaaacgcgggttgcatacgtccggcgcatggcgtatgaataagcctgtcagtttcagggaaggtgcaattccttactggcggtaacctgcaccccgggtttcataacggggatggtaggaagcccgcgacccgcgcaagcggctgatccggtgagattccggagccaacggtatagtccggatggaagaaacgagggctcattatgagtgtatcttcgcgtattcgcatgcaagttgttcgttctgtggcacccgaggccgagggttcggccagcacgtccaccgccagcaccagcgccaaacttggctcacacaccactggtgtggccgattctggccgctggtccacgcgccgtatcgccatgtatgcactgttcgtggcgctggcgatggtcaccagcttcattgaattcccgattacgccggtcacttggctgaagtacgacccgtccggcatcgtctgcctgattgccggctttgcgtatggcccggccgccgccgcaatcgtgtctgtgctcggctttgtgccgcacatgttcgccaatccgtggggttcgctgatggctgtgctggtggcgctgttcctgtctgtgccggccgcgttcatctaccgtaagatccggacgcgcaagggtgccgccatcggcattctggtgggtgcggtgctggccatcgtggtggcgctggtgagcaacctgattgtcacgccgatttacgcgcacatgacctaccaggctgtggccgcgatgattctgccgattctgctgccgttcaacgtggctaagatggcgattcacgccgtgatcaccttcctgatctacaagccgatctccaacctgctgtccaagcagcagtgactggcctgagacgggccgatgcccgccacgactaacgaccactcaacgaccactcaaagaaccagaacgcagaatcccggcacgggccgggattctgcgttttcgcctatcagttacggattgctgtttcatgaccgttgcatcccattccttcgacgccgacgagttccacgattctgccgaacctcacgcttccgccgagcctgcctcccccgccgccgtactcaaggacattcgtttcagctatgaccgcggcacctcatgggctttggatggcgtttcactcacggtccatgccggcgagcgcctatgcttggtcggtccgaacgggtcgggcaaatccacgttggcccgtctgattgcgggattgaccgcgccggacggtggtgaagtgacgttactggggcaacgcgtgtacgcagccggcccgaatgccgatgcctatcgtgctgcccgccacggcatcggtatggtgttccagaatcccgaggatcagctggtcaccaccgtgttggaggatgacgtggcctttggcccggagaatctcgggctggagcgcgagctcatcggcgagcgtatcgttgattcattgcaggccgtggggttggcgaacttacgccagtccgacccgacccgtatgagcggcgggcagcaacaacgcgccgccatcgccggcatgctggccatgaacccggcaatgctggtattggatgagccgaccgccatgctggacgaatccgcacgcgccgaagttatgcgcattttggatgatttgcaggcgcgcggcaccactattgtgcatgtcacgcatcatccagatgagaccgttcatgccgatcgcatcgtgcacatggaggccgggcgaatcattggtatcactgcagccgtcgataatcgatccccgctagcggaggctgtctcgcaaagcgagactgagggtagtatcggcacagaagccgcccccagtcgccctacgaacgacagcccccgccagcgggagcgcgaagacggctccgaactgccgctgctctccgatggcatcggcgatatgacgaaccccattattcgcgtctcgcatctgacctatcgctatccttcggccaaacgggcggttatcgatgacctgtcgttcaccatcgcgcgcggtgaaaccgtagcactgatgggcgtgaatggttcgggcaagtcgacgctggtgcgcatgttgtgcgcactgactgcgccgaccgccggcagcatcgaagtggccggtgttccggtggcctcgaccggcaagcgcggtcgcaacgtgcgcccgaagtcggcgaatcgcaagcaattggcgcaattgcgccggcatgtgggttacgtgatgcagcatccggagcatcagctgttcgctgacacggtagccgaggatgtggcgtacggcccacgcaaccaagggcttggcgagaccgaggtagccgaccgcgtgcgcgaatcactggaactgctgcatatcgggcatcttgccgaccgctcccccttcgacctgtccggcgggcaacaacgattggcagccattgccggcgtgctggcttgcaatcctgacgtgctcatcatggacgagccgaccgcgagtctggacgcccaagccaagaagcgtatccatgagctgttacgcacgctcaaatcgcgtggcgtgaccgtgctcatcatcacccatgaccgggaggaggccgagcaaatcgccgaccgcgtagtccgtatgccgattgccgcccccgcatccggcggccccgtcacggccaccgtcaccgagccggccgtatcctccaacggccctgcgcactcagtgatacaccgacttgacccgcgcgtgaagatggtgggcttcctggccgccatgttcacgatgttcgcggtgaacacgccaacccagctcgcgctgggcatcgccatcaccctggccgttatcgcggcggcacgcctgaacccgttacgggtgcttgaatccattcatccgattctgatcctgctggtgctgatgggcgtggtcaatctgtttgtggtacgcaccggcacgccggtggtggcgcttggcccgctaagcatcaccgatcagggcgtgaccatagccgtgctgtacgcctgccgtttcgcattggtaatcattctgggcgcggtgttcctcactaccaccacgcctaccgccatgaccgacgccttcgccaccttgatcagtccgctcaaccggctcggtatccatgcccaagaaatcgcgctggtcatgagtctggcattacgattcattccaacgctgaccgacgaaacccgcgccatcgtcgacgcccaatccgcgcgtggcggttccatcgaaaccggttcgctggcccagcgcatcaaggcgatgagcgcgattatcgtgccgattttcgccggcacgttgcgtcacgcggacaacctgagcctcgcacttgacgcccgctgctacgaggagggcatccgccgcacccactggcgtgccctgaccatcgccgcgcgagatctcatattcgccgctgccgtcatcatctacatcgcggccatcatcgcgctgtagggcggcaaacagcgcagacagcaccggttgctatgctggtgtggttatacgaaagatgtaaggaaattcccatggcattgaccaagaagcaaatcaagcagctgcgcgcgatggcgaactcgctgaagcccctgttctatgtgggcaagaacgatttgaccgagtcggccgtcaatcaggccgatgagaccattgagaagcacgagctcatcaagtgcgccgtgcaggacggttctggcctgaccgccaaggaagccgccgccgagcttgccgagcagctgaacgccgaagtggtgcagtccatcggcaatcgtttcgtgctgttccgtcgctcccggcgcgacgatgtggagcatatccgcttggtgcgcgagtaatgttcgccccgctcgatcccgtagcttgatatgagtaatggcggttggaatcagtccgattccaaccgccattactcatattcgcccagcgagcaccgtcactgatccaagatggacccgacgattcccgcaacaatggtcaggaccaaggaccccagtaccgaccaccagaaaccgtgtacgaagacgcccacgccgaacagactgaccgccagccagctggcgagtcgcatgaacagccaattgataatcaaggtgaccagcccgagagacagaatcgcaaacggcagtgcgatcagatgcacaatcggcttgattgacgcattaatcagcgccatgaacaaagcgaacgcggcgatgccgagaatcggaggctcccccaccggggtcatgccgggagtcaccgcgaccatgacggcggcggcgatagtcataatcaaccagctggtcaggaaacttctcatggcccaatcgtagcgcggcaggttttactattgggcaaaacatgagatgatgttgtgcagaaacggtaagaaggtattgccgttcccgattgagaggggactgacccgcatgactgataatcaacaacaaccgtacggttcggacagtgttccgcagccggcacagcccgcacagccggcacaaccgtcttacggccaagatgccgcacagcagccgcagggctatggcgccccacagcccgccgcatacgctcaacccgccgccggaagctacggccagcagcaaccgcaatacggccagcccgccggcgcatacgctcagcctcagtacggccagccgcagtacggccagcccgcacagcccgcagcgggctacggccagcagcccggctatggacaggcttaccagcagccgaacgcctacgcgcagccgcaatacaccgccgctccgtatgccgccgccccggtggggcaatcgtccaagtccaagctggctgccggcctgttgggcatcttcctcggcggacttggtgtgcacaacttctatctcggcaacaccggcaaggccgtggcccagctgctgctgacgcttgtcggctggattctgctcggacttggcccaatcgcagccgccatctggggctttgttgaaggcatcatcattctgtgcagcaagcccggctcaccgtggcataaagacgccaacggctacgaactatcagactgaaactaacctcgggccacgttcattgggcctctgatcaaccacgcctctgcaggtatcatctcgatgccgcagtcgcagcgggatgcgacacgccggccgtgtacatgagttcatgtacacggccgttttctttgttgctttcaccctcaaaacaaacatttatcatgttcacttttgcaagatatgaacatcaaacatcacagactaccataacttcccaattgcattaccaatagattaataaccggcaaaacggcttatatccgccatttttcatgctaggctttgaaaccagcacatcaacaaagtgcacaatccttttctacagagaaggtaacatgttgttcaattcatatgtgaatcgaacaatgccagtacttccctaggtgcttgcttggggaacgccatgctgaaaggaacacattatggcggagggaaaagtcatcatcgtcaacccggatatgttcggcaaggacccggattcgaaaacagccaaggccaatgaagtggccaagagcttcggcctgagcgacgcggcgttggccgaggtcgaggacttcaaggcacaactcaccaaacacaacgcctgggatctgccgttcatgggatacgtcaacgaggatggctacggttacgcctacgtgcccggtgccgccgtggtgtacgacccgtactgggacgcccaccaagcattcctggcgctgcctaaggacgtgcagaccgcattcgccattcgtatgctgttcacgcaccgtccggtcgaccgctatggcgccagcatgttcctgcattaccagcgtggcttcaacgtgaagttcgagggtatcggcgcgaaccagtactgattggtactgactatcaaccatctttttcggattgcccgataaggggcgtataacaacggtgttatacgccccttatctgtattcagtgtcaggcgatggccgcccgccgcccgacacagacgaatcagtatcgcacgagattcaacagttcctgctgtttggcatagcgggaaacgttggtcagggcgatgcggatgatgtgttcggaagtcttttccaaatgattgccgccggccacatgcggggtgatcaggcaatgcggctcatcccacaacggactttccgccggcaacggctcaggctcggtgacgtccaatccggcaccgtggagccgtccattgtgcaaggcgtcagccaaggcctcgggatcgatggcgtcgccacgcccggcattaatcacgatggctgtggatttcagacgacccagacgatccgcattcagcagatgatgggtctgcggcgagcgcggcaccgccatcgccaccacgtctgccaatggcaacagcgtctccagccgctcgaagccatacatcttttcaatgcccttggccggcacgtccgcatgacggcgcacgccgaaagtacgcatacctacggattgggcaagctgagcgaaatgcgacccgatgtcaccgacgccgataatcagcgcgatgccaccttccgggctcaataccggtccttcatcctgccactgatgatcacgctgattggaggcataccggttgaggttcttcatcaatgcccacatggtggcgaacatgtgttccgacacgctttggccatacgcgccgctcgcattggtgaccatggtgccgcgaggcagcacacccgggcagatgtacgcatccacaccggcgctgaaggtctgcaaccattcaagacgggtgtattgggaagcctgcgagaccggaaagttgccgatgactgcggtagctcgggagcgaagctcctcgggaacagcggccgaccagaccatgtcgccgcggtgcgcttcgtcgcccacgaattcctgcggcacatcgcgagccgccttggcgaaagcccgccgttctccttcgttgagtggcaggcagttgacaatcagcttatgcgtgttctcaatacccatggttcaccaaactaggcggcagggcagatattatcgcggtttcctcatgctgaaccaatgccgaactgctaccggaccaatgccgaatccgccccatcaaaccccaccaaaccaagggacaacccattgcgcatcgaccgtagcgtccgccccgaaccgtacactcacaggtggttttgtgattccatagcgtgcagccaaggcagtacgattgccggtttatccgcacgcacaggtacctacgccggttggtaaaccttacattccataccttgcaaccgaacgtttaggagcatgtatgcctgagcagcatattgataacgagaagattcccacacgtcttatcggcgcgattgtggctgtcggctcacttgccttcattggcattctgaccgaaaccgtgatgaccgtgcttttccccgcactgatgcgcgaattccatgtcgacacggccactgtgcaatggattaccacgatttatctgttggcggtggccgctaccatgcccatcagctcgtttttgaagcgccgattcgcgctgaaaaccatttttcttgcggctgtgattctggccatcgttggctcgctgatcatgatcgtcgcccaagccttcccgctgctgattgtcgcccgcattattcagggcattggctcaggcgtggccacgccgttgatgatcaacatcatcctggagcagtctcctcgttcgaaaatcggccgattgatgggcgtaggatcgctggtcattaccgtggctccggccatcggcccgaccgtcggcggcgcggtgaccacagtgctgccgtggcgcgcgattttcgtcatcgccattccgctggtgctaatcgcagcatgcatcggcatgaagtgcattgagcagaagacaccgaccgaggctgcctatcttgacccgattcagcttgggtccattgttgtcgcgttggtcggtctggtgctggcgctcaaccaaggtggcgtggccatcagtgcggcggtgtccggcaagtcagccacacgctccggcattatcgccattgtcagtctgattgtgggcctcgccttgttgatcgtgttcgccatgagttccaagcgtgccttctccccgctgctgcgccttggcattctcaaggatcccgccgtactgttacacgcctgcgcatatctgctgctgccattggtcgccatcggctacggctatgtcatcaccaatgtggcacagctctcgctcggcaccacggcatttgtggccggctctctggtgctgcccggcgcactggtcggcgctgtctgtgccccgcttggcggctggttctacgataagttcggcgcggtcaagccgattctgattccgatcggcatcgctattttgggcccagtgcttatgctggtgttctcgatgcagcttacgcccgtgctgctcgccggattctatttcattttcggtctgttctattccatcggcaatgcgaatgtgatgaccagtggcctgtcggaggtctctcccgagttcaagccggacggcaacgccattttcaacacgtgtcttcagtttggcggcgctgccggtaccgcactgttctccacgattctttccgtggctcaggccggcgcaggagaagaaggcaccgctgagtttgctcacgccactgccgtcggcggcacatggacgtttgccacgatgacggttatctgcctgattggctggtgctgtctggccaccgcgttccgcattcgcgcggcacgtaagcgtgcataaatccgatcatcaatagagtcccagctttccaaacacgtgtggggcgtgccccgggagaaccccggggcacgccccacacgctaatgaaaggaagaaaaggagaaagaaagctttggcgggcagtgccggctgctgtgaccttgccatcacagcagccgggctgatcccgcctattcagttatggtgtgtgtcgtattcggtgcggagaccgagcgggcaagcccgctattttttatctccgccgaccgccatcaccgcgcgctgaagcacaacgaagacgaggatcatgagaccgataacgatggtggtccattcggccggcacaccgaagtcagaggtgagcggatcgaggatggagcggaccagagagccgagcacggagccgagcacgtagccgaagccaccggtgatgatcgtaccgccgatgaccacggaggcaacggcgtcgagctcccagccaacacccacagtgttcttggcagagccgatgtttgcggtgtacacgatcgaggccagggcggcgagagtcgcagaggtcaagtagatgatgtactgcgtgcgcttgaccggcagacccatgagttccgcggaggaacgggagccgccgatggcgtagatggtgcgtccggtgcgggtatggtgcaggaagacgtagccgaagaccacaaccaccagtgcgatgatcacgccgacgttgaaggacagatcgttggagatcttcggattgtcgatgatcttgatcacgttggagatgaacgagaagtcattgccctgcgggaaggtcagcgagtcggtggagatgatggaggcaagaccacgggccaggaacatcgtcgacagggtcgcgatgaacggctgcatgttgaattcctcgatcaaggtgccggccagcaggccgaacacagcgccgatgagcagcatgatgatcatgaccaggaaggcgggcacgccggcgttcgccagcttcaggccgacgactgcggtgatggccacgatagcaccgacagacaaatcgataccaccggtcagaatcggcagggtcatggccacagccagaataatcaggtaggcgtggtcaatgaacagggaggagatgaagcccagtcgaatgtaggtgccgaacaacgcctgacccatgatgatcatcaggatgaagatcaccacggccgcgagggtcgggatcatctgacgatcgagcttgaagcccttcttgggagccttcactttgtttgccgtagctgttgtcatgctgccaccgccttagcttgagccttgagcgcgcgcttgcgtttcatattcgcgctcaggttgtgaatcttcggagcctgcatcacgcagatcacaatcacaacgacggcgaagaaggccggagttgcctcggcgttgacgcccagggtgatgatggtcttgcggatcatggcgataattacagcaccgacagcagagccggcgagggagaacttaccacccagcagtgaagtaccgccgatgacgactgccagaatggcgtacatttcgaggtcctgaccggtcttaaccacgtcgacacgcatcacggatgcggtggcgaacagaccagcgatggccgcgaggaagccggaaatcgcgtagacgaggaagaggatcttcttcggcttgataccggtcatacgggaggcttcctggttgatgcccacggcctcaatcatcatgcccatagcggtcttgcggcacagcaggccaacgagaatcacaatgataacggcgatgacgaagttggcgggaatgcccagaatgaagccgttggcgaaccacttcagcggttcgttgccagcaactgcggaggcgtcggtgttctcaccggaggtgatgaccttggccataccacggccggcgagcatcataatcagggtggtgatgaacggctgtaggcccaggaaggaaaccagagcgccgttgacgcagccaatggccagaccaacagccaaggcgatgaggatggagagccacacgttcatgccattggacagggtctgcatggcggcggcacctgccactgccataacggaaccgaccgaaaggtcgataccggcggtggagataaccaaggtcataccggttgcaatcatcaggtatcgggcagattcctggagcatggtgatcagcgggccggccagaccaccggtgttgctgttccagctcagagccaggaagtcatgctggaagatggtgcagatgatgaccagaagaatgaatgcgacgatcgaccaggtcaggttgctgctcagcagcttcttgacaaagttgttgccctcggcttttgccttttcagccatctcatgcctcctttccggtgtttacgttggtgttagcgatggtttcgacgatggtcgcctgagagacggtgtcgtcgttttcgatttctgcgatcttgtggcggtccttgagaacctcgatgtcgtcggacagacgcacgacctcttcaagctcggaggagatgaagacaacgcccatgccctgagaagccaggtcaagcacgacctgctgaatttcagccttggcaccgatatcgataccacgggtcggctcgtccagaatcagcagctcggggtgcgtggccagccaacggccaatgagcaccttctgctggttgccgccggagagattcttgaccgggcgatccgggtcggcgggacgaacgttgagttccttcatgtacttgtcaacgatggcgtccgcttccttcttgggaatcggcttgaacataccgcgcgttgcctgcagggcgataaggatgttctggcggacggtcaggtcgccgatgatgccctcatcacgacggttttcggtggagtacgcgattttgttcttcaaagccgtgtacggatcggagatgttgaccttcttgccgttgagcgtgtaggtacccgaatccggcttgtcggcaccatacaggagtcgaccaagctcggtacgaccggagcccagcaggccagcgaagccaacgacctcacccttgtagatgtcaacatcaaccgggttgatggtgcccttcttgccgaggcccttgacatcgacgatcggcttctcgccaggggtgatttcacggcgagccttcttggcaccaatctgggacagctcggcggcggacttaccaatcatcatgccgatgagttcgtcgcgcggggtgtccttggtcatgacctccttgatgaactggccgttacgcagaatggtcagacgatcggtaatctcataaatctgatcgaggaagtgggagacgaagaggatggccacgcccgagtcacgcaccttgcgcatgatcgcgaacaggtccctgacctcgttggcatccagcgaagaggtcggctcatcgagaatcagcaccttggcgttgataaccatagcgcgggcgatggcgaccagctgctgcatagcgatggagatggagctcagcggagtgtgcgggtcaatggattcgaggcccatctgtgccaaatacttcttggcggcctcgtgggtcttcttccagtcgatgccgaaggggccgcgcttttcgtggcccagcatcacgttctcaccgacggaaaggttggtgcacaggttcacttcctgatacacggtggcgataccggcgttttgtgcgtcgagggtgccgttgaactgctgaggcttgccgtccaccataatggagccggcgttgatcttgtacacaccggtcagagccttaatcatggtggacttgcctgcaccgttctcacccatcagggcgtgaacttcgcccgggtagagagtcaaatcaacaccatccaaggccttgacgcccgggaattcaatcgtaatgcctttcattacgacgatggggtttttatctgtcatgtctttgccttaaacgagaatgaagtgttatcgttttgtgatatttgagccacacatgagtgatggtgtggaaggaacatccttctcacaccatcacatcaattatttggttcagttatcaatgagtcgcagcagacttatcagtaggcgcgggtgttgttgtccagagcttccttggcggaggcggcgtcgaaggtcttggactcgatctcgatgtccttctcaacggtcttgccatccaggtagtccttgacggcctgagcggtttccttgccgaaaatcgggttgtactcgatcacgtaggagaggtcaccatcaacaagagcctgcagagcgttcttggtaccgtcgatggtgatgatcttgaccttgcccttgaggccggcggcgtcaacagcctgagcggcaccgaggcccatctcgtcgttctgagcgaagatgaactgcgggttgtcggacttgtacttgtcgagcagaccagcggtcacggtcttggcctcatcagtggaccagttagcggactgggactcaagaaccttgacgttggaggcaaccttgttgccccaaccagtgccacgatccttcaccacggacaggccggcagggccttcgaggatgaagccgttggcgccatccgggaagttcttgttcacgaactcggcagcctgctcgccgcaccagacgttggacggtccgatgtgagcaacgatggccttcttggcctcggcgtccttgacgtccacgttacggtcaacggtgaagaccggaatctcagcctcagcggccttcttcagggagtcatcccaaccggaatcctcggtggaggacaggatgatggcgtcgacttcgtcgttaacgaacttgttgaacgcctgaatctgcttctgctgatcgttgttctgggtcggagagtaggtcaggtcaaagccggcatcctcgaatgccttctgaatgtccttctcgttggcggtacggaagccgccctcaggaccgacagccacgaagccaaccgtcttcttgccggagtccgagctgccacctgcgttgctgggaccgcatgcggcaacgctgacaagcgcagcagcagaagcaacgagggcaatggccttcttccaattcttcataaatactcctcctcgagcagtgtttattttttggatgatctttcatcctgtttggtgactgttcgtcatcgacagcctctagtatgacgctcacaggccaaatgttcaatcgcatgcgataacagtttgataacaggtttataacaaattaataacagtggttcaaaaatggcgtcgcaacactgttttgccttgataacagaccaataatagtgattggttgcgcagcggcaatgccgctcgccagccgagcgacaaagccgttgcctcatacaacaagaaaggttattatgaacaccgtttttcttataccatctactgcgcaccgagggcagtgacctggctatcggcgatggtccaggaaccgtcgagtgagccagaaacggagcgaacaatacccaaatcgtccacaatggccaggcgacgggacaggctaatctgccccgatgccatcgacgttatggttccattaggcagacgctgcgcattggccgggcctggtgccatttgatgccatgcctcttgttgttcgctgtttccctcaggaggtgtggtggcgtacaccagattcagatcgttgtagaacgtgagcatggtgacgtgtctgagcacactcacttgggtggccgctttgctcagaccgctcagtgttttatcaccgttgcgcgccacaccggtcatcatcacgccgttcgtgtcctcgccctcgactgccaacgccaatcggcacccttccggagaaaccgccaatgccacaatgctgtcggcagcgccaagccaatcaagcttcagatcggtttccttacccccatctgacacatgcaattcgcgcccgttctcggatacagcccatacttcgccatccagaccttcggtaatcgatcgcatcgactcgccggagaacatcaccccacaggacgcaccatcagatttcaggcattcgacgacaccgtccgcacgcaacaccgcaccgccggatgaggaaaaaacgaagccccgagcatcgtcatatccgggggcctcccctacacgcaacggactggagctggccagggaaacgatatgcccaccggtcaacgtgtatacgcccgctgtcggctgctcggtagtaagtttcacatttgcgtcggcatcagaatagtccactccgtcgccggtaatcttcagcgcgtattcggcattgccgtcgcccatagtcagacggatgcgatgtaccagcaggcctcgttcttcctcattcaacgcattgataccgctgttaaggtgtatctccaccacattgttcttcaccggcacgctgtcgaccgcgagtttgatggtaggcaagccggtgcctcgcagcactccttccaaccaggagggtgcatccgagagtacttcaccgactgcctgggtgcgccagttgcgccagctcagccatcgaacatccggtatgagctgtttgccggatgtgctcacctgatacacggatacttggcggaagacttgttcaaaatcggcggtggatatcaccacgccgttctccaacgaggagatgcgccactggccgcttcttttaatcaagatataaggaactttgctgatcgtgctgctatctgtcggcgtatacacgccatgcgagtccagagagccgaccacttggagctgtacttctacaatcagcgagctctccgccccttgcggggtactcatcgtattggcacggcggcggaaatccggcgtaccgctgtagaccagtgccgaggaatcgccattccatccggccgacgccgaaccggtcagaaactcacgggccacacggtagccatcggactgtacgccggcaggcatggcatcatagaaccctttgacgatggtttccggctgcgcatcgtccgcaggtccctgaggattggtgtaaacacgctgagtctgctgttccaccggtgccagagtctgcaccgagccgctaatcggcaaaccgaacggacttgagcatgccgtcatcgtgacgcaacagactatggccgcgcctgcggcggcaatcgttctggtcactcgtctcatagcggcctccccatcatcgtgtcgcggcgaacctcatgataatcatgtgtgacttggctggtggccacaccaaacccaccggtaatacgcaggtcatcgggcgtttcagaagcaaaattcaccggcagttcagcgtccgccacctcaccttggtcggggtcacgcggcagcaataccaagaaccaggtgccctcccccactgccgaacgtacacggatagtaccgtggtgcagcaaggcatcagtcatggcgatggccaagcccaatccggtgccgccggtaacgcgcgaacgtgaagggtcgcttctccagaatcgatcgaatacatgagcgactttgtcttcgtcgataccaacgccatagtcgcgaacgctgatggccacggctttgcggttggccgcgacacgcacttcgatcggccggtcctcagcgaaatcgacggcattggccaacagatttctgacgatgcgaatcactcgacgcgaatcgatacgagtcaaaacctgcacattgggcagatacgtgtgaatcggcacccgtttggcttgggcgatgccggcaacttggtccactgccgtttcaattggttcgcataaatcggtttccacaaggtcaagtgccgcataaccggcatcgtagcgggagatttccaacagatcggcgagcatgtcttggaatcgactgatctggccggccaacagttcgaccgtacgcttggtggaggggtcgaagccgtcttttttcatttcgagcaggtcggaagccatacgcatggtggtcaccggggtgcgcaattcatgactgacgtcggacacaaatcgtttctggaaaacgcttgcttcctccagctcatcaatcttctggttgagcgcatcagccatcgtattgaaggattgctgcagcacaccaagctcatccttacgattcacggtaacgcgcatatcgagattgccggaggccagtgtttccgaggccgctgccactcgttcaatcgggcgcacgatgccacgaatcaccagccagattactacgcccaccacgatggacagcaacgcacagatggccaccagactgagctgaatctgcgtcaaggactgttgctggagcgtgtacgaataaatggcgaagaattcgaggttgccggccacgccaaagtccaatacggtgccgagcaccgctgcgggcgtcccgctgcccgacatgccggaatcaccgggaatttcgaccggctgatagaacacgctgtcatccaagtcggaggccacggacgaacggatgtcatcagaaatcagactttgatagctgggttcggtggatacggggatgatggcacgcgagttggtatcacgactccacaaatacacacctatcaggttggagggcccctcggattgcaacgaggacgccaagtcattgaccagctgctggatctgcactgtggcggagacatcggccgcgtccagactggtttgggcctgctgcaccatgtttgaatagtcggcacgcgactgcgaagtgattcgggtaagcagcgaggcgcgcactgataccatcgatacgccagagaagacgatggccacggccagtgtaagaatcacggtgagggccacggtgcgggcctgcagcgagcgacgaacttcagcgcgtccgtggcgcagcaagcgtttgaggctgaatcgagggcgcaggttcattgttcaggagtgacgaacttgtagccgatgccacgtacggtctgcacgatttgcgggttctcggggtcgtcctccactttggccctaaggcgttgaacatgcacattgaccaggcgcgtatcgccggaattctcgtatccccagacattcttgagcaggctggaacgactgatggcctcgccggcggcggccgcaagcatgaacagcagctcgaattccatcggagtaagattcaggtccttgccatccttggtggcggtgtgttccaaacggtcgatgacgatggatccgcgttccagatggttgacgtttgcattgccaccgcttgcgccaccggtggcaccgtcttcggcggccggcttggcgatgcggaagcgtgcatggatacgcgccagcaattcggccactttgaagggcttgggcacgtagtcgtcggccccggcttccaagccggccacgacgtcaagtgtgtctgatttggcggtgagcatgataatcggcacattagaggtagctctgatgcggcgggccacccccgtgccgtccagcccggggagcataacgtcaagcagaatcaaatcgggcttgacgatggggaacatttccacagccctcagcccgtccaggcaggtcacggtctggaatccctcgttttccaaaacaagactaagcatttcgccgatggcctgatcgtcgtccacgatgaagatggtcgccatggtgtttgtcttccctttcccactgttattgttgcgttacactttactcccctatgttcatttctgttcgggttccccaccatgcagtatcgggcgaatcttggcaagacgctggctgacttcgtgttcgtagccgcgatcgttgggatggtagtactcggtgccacgcagctcttcgggcatatattcctgtggcgccacggcaccgggccaatcgtgcgcatacttgtagccctcgtggttgccccactctttcataagcttggtgggggcgttcctcaaatacagcggaacagcgccgatcttgccggcatccacgtccgcgagcgcctggttaatggcgttatagctggcgtttgatttgggcgcggtggccacggcaatcgtagcttcggccaaaataatacgtgcctcgggcatgccgaccagcgccacggcctgcgccgcggccacggtgacctgcaaaatctgcggggcggccatgccgacttcctcgctggcggcgatcatgatgcgacgggcgatgaagcgcggatcttcacccgctttcagcatgcgtgccagataatggatggcggcatccggatcggagccccgcatggatttgatgaatgcggaaatcacgtcgtaatggtcatcgccgtctttgtcgtagcgcacggtggcggtgtccattaccgtagccacgatttcgggggtgatgatgggtcggcgtgcgccctttttgcgggcttcgtcgccagtgaccgcgccagccgcggcctccagaatcgtgagactcttgcgtgcgtcaccaccggccatgcgcacgatgtcggcgatggcttcgtccgtggctttgacctcgcccctgagaccgcggtcatcagtcagcgcgcgctgcaccagttcggtgagctgatcaggctccaatgactcaagcttgacgaccaccgaacgggagagcaacggtttgatgatggaaaagctcgggttctcggtggtggcgccgataaaggtcacgtcgcggttttcgacggcgggaagcagcgcatcctgctgggatttggagaagcgatgtacctcgtcgatgaacagtacggtttcctggccgcgtgacacgagccgttcgtgagcgcgggtgagtacgtcgcgcacgtctttgacgccggatgtcacggcggagagttcctcaaacacgcggccggattggccggccacgatggtggcgagcgtggttttgccgacgcctggagggccgaacaggattacggagctcggcgcggtgagactgcctttgctggccggattggcgaggcggcgcagcggcgagccctggcccaacacctgcgtttggccaatcacctcgtccaaagtgcgtggacgcatgcgcaccgccaacggccgcgtcatcgactccggcgcatcagccgccccaaacaaatcgttctcactcataacgtcctatagtaccccagtgttcgaacagacgttcgagctacaccctggcttcccccagagagggaagccaagaaaggaatcagttactcaccttgtagtcgtggaagactacttcgccggtgtcttgggtggcgtcgaggtccacgatgccttcgatggcccagtcgtgatcgccatcggaatcatcgataatctgacgcaccttccacgtatgctcgtcgttctcgtgcttgtcatccaacatgaacagttcgggcgagcgcgcttcggcgccgatgcccacgtactcgtgctcgtcatagtagtcgtcgagcacatcttcccattcgtgcacgccgtagccccagtctttgtcgagcgcgccgagcttgtccggctggtcgaggtccataagctgcacacggcggaacatggcgtttctgatcagcacgacaaggcctcgtcggtcctcgaccaccgcgttcttcttgcccggcgccgccaaggaggccgccgcctcggactggtcggcggaatcgccggcgttctcccattcatccaccagcgaggagtcgatggagcgcacgagcacgcgcagccaggagatgatgtcttcgagttgctcgtcacgcttttcgtgcggcacggtacgcgccagcgtgcggtaggcgtccgagaggtagcgcaacagggtaccttcggagcgggcgatgttgtatcgggtgatgtatccggtgaagtcggaggcggtttccaccatgtcgcgcaccacggatttcggcgatagccagtagtcgttggcccacggcacatcgtggcggtactggtcgaacgcggattcgagcatgtcttccagcggcttcggatacgtaatctcctgcagcttatccatacgctcgtcatagtcgagtccgtcggccttcatatcggccatcgccttgtctcgggcctgacgctcctgggcacgcagcacctgcttggggtcttcgagcgtggcctcggccatggaaatcacgtccagcgcataggtgtcggactcggggtccagcagttcgagcgcggccagcaggaacggggagagcggctggtcgagggcgaagtcgtccggcatatcaagggtcatgtagtagtccttgccgccgtccttgcggtcctcggtttcgatgacttcggtatcgaacagggtttggaaaatctcgtcggcccgctggtgcagatgctccttttggtcgggggtctgcgcggaatcgtcgatgagatcgtcgatacgggcacgggcgtcgccgccctgcgccacctcgttgagcaccatcgaatgcgtgattttcaggtgcgggaccagggtttccggttcggcgtcgatgagcttgtcaaacgtgctctggttccaggtcacaaaaccttccggagccttcttgcgcttgaccttcttgagcttcttcgggtctcccccggccttggcgatggccttctggttttcgatttcgtattcgggagcctcggcgatcaccagtccctcggtatcgaatcccatacgaccggctcgtccggcaatctggtggaattcacgggcgcgcaggcggcgcatcttggtgccgtcgaacttggtcagggccgtgagcaccacggagtgaatcggcacattgatgccgacgcccaatgtatcggtgccgcaaatcacgggcagcagaccctgctgggcgagctgttcgaccaggcggcggtagcgaggcagcatgccggcgtgatggatgccgacaccggtgcgcagcagtcgctgcagaatcttgccgaaggctgtggtgaatttgacgcctttgatggcttctgcgatggcttggcgctgttccttgctggacacgccggtggaggcgagcgcctgcgcggtctccagcgcggcgtcctgcgagaaatggaccacataaatcggggtttcgccgttgcggaaggcgagttccacggttttttccatcggatcgagcgtgtattcgtagcttaacggcaccggtcgcggcgcgtcggcgattacatccacgtccggggtgtcgttcagatcggagagcctgtcggcaatggcgtccacattgccgagcgtggcgctcatcagcaggaactgggtctgcggcagcgtgagcagtggcacctgccacgcccaaccgcgctccggatcaccgtaataatggaattcgtccatcgccacaaggcccacgtcggcatgggtgccttcgcgcaaagcctgattggcgaggatttcggcggtgcagcagatgaccggcgcgtccgcgttgatgtggctgtcgccggtgatcatgccgacgttgtcgcggccgaacacttcgaccaagtcgaagaatttctccgacaccagcgccttgatcggagcggtgtaataggagcggcggccagtgcacagggcggcgaagtgcatgccaagcgccaccagcgatttgcccgaaccggtcggggtattcaaaatcacatggtcgccggccaagaggtccataatggcctcttcctgatgcggccatggttcgatgcctttgatgtctcccacccagccgaagaatcgttcgtagatgtcatcggccgtaagattccgttcacgctcgtcaccgtcccattcgggggccagccgccccagggatccgtattccttctcgtcagtcataatgctcagtctacctagtggcctattccggcggcacgagccaccctccgtcgctatgcgacgcctcccgtcagcgggcggagccatgcgaagagccgtgccatgcgcttggctccgccagtgggaggatcgctcacgccaaccggcggcgcacctcatcggggtccacctcgggttcgaggggcggccaggtcatgttcatgttcttcaaggtggtgcgcagcagttcggagaccactgctcgcgaataccagcggttatcggccggtacgaggtaccaaggtgcggcggccgtgctggttttctcgaacacctcctgccatgcggccatatactcatcccagcggtcgcgggcctcgagatcggagatgtcgaatttccagaacttggtgggatcgtccagtctcccgaggaagtgttttttctgttcttcctggcttaccacgaggaagatcttgaggatggcgcatccgctggcggccagttcacgttcgaaatcgttgatctggtcgtagcgggcacgccatacgtcttcgggataggtgccatagacgtgcggcatgaccacatcttcataatgggaacggtcgaatacggcaatccaccccggcttgggcaattcacgcttcacgcgccagaggaagtcgtggtcgagctcctcggccgcaggcttgccgaagccatggtaatggatgcccatcgggtcaccttggctgaacacgtgacgcacgatgccgcccttgccggaggcatccatgccttgcagcacgatgagcagccgccgtgtcgagcctttgacgccattcgcgtacatgagccgctggtatcgggcgatttcggaggagctgatcgaaatgaacttctcggcgtcctctttattgccgtcgaatccgggagtggaatcaccttcgacatcagtgacctgcatgccgtggtggaacataagacgttgagcgggcggcaacgaccatacggcgctgagcagttcactggatttcgccgcacgtgccagtcgttcaggcacgcttgcactggagtcgatggtgtctatgcgatccgccgcgagctgcaataccttgtcgatccgtcgatcggttttggattcctttcccttgccgttcttgttgttctttcctgaggattttccggctgtaccccacttgccggcctcttcaggttcgttggttctgtcgtcgtccttggccatgctcccgattgtacgtcttgtaactcaggagacccagcaacgtagcgacattcacatttcacttgttactgcaaatctataggcatgcagtcgttcggaccgtaattgttggctttgcaccaattccaagcctcatccgtcgagtcgaagccctcaccggcaagaatcacatagtgtttgtcggaattgctgctgtaggtgggccagtcacccgaccagataagcagtacgtttgacttcttgttgtgcatcgtgatgaattgcgcaagaatatcgcggtagttccaggtcttgccttcagcttccatgcccttgcgcttgctggacagctgcgcggtatacgtggaatagacccgaaaaatcgaacacggcatcggccacgacattatcgtcgctgtcctgcaacgtgagtcgggtggccgaatcattgaatttcgtggatgcgttcttatcatcacaattcgaagtggccagaatcgtgactatcagattgtcgctctcgctcttgatcgaggagactttcatatcggcagcggcatcgcaggttttggcaggctttgccttgtcggggtcgatgtatgccaccagatatccgccggctttgatgacggtgtccgtattcgttacttcgctggtgccgatggtgtagtgcttcttggctttcttaccactgccgtagatgcccagaccttcacgtcaacgtctgtggagccggtgttcttgagctcgacccaatcgcaacgcttgctatccgggtctccggcagctttcgtattgccggcatagacctcgttgatgattacggatggtttggcagccgtgttctgttcggcagtggtctgctgctcgtccgcagtcgcagcgggcacgccgatcagggcgatgctgctcagtgtcaccgcagcggtgagcagcgcgactgaactttggctgaattactgctgaagctggttcttggatttgcgtcgaaccgtccgtattccgccgacaatcgcgattacagcggtaccgatagctacgctgatcaacgacggtcgttgcacggcatggagagtggcgagatccggcccggccgcaatggcactgttttcacccgccaagctatccgacgccgggtgattgcccgcgtcgatgtactgggcattgaccacactcgggccggcaagcgccacttggtcagcggtctcgaccttggccacatcgccgtgcttatccaaggtgacgcgggcgcacagggctttggcccagttgatacgctgccagccgtcgctcgattgccatagggggtatccggaatccaaggcggtggctttcaaaatcgcgttgcgctgatcggcgtgcagttcgggataggccagtcgcagcacgtccgccgccccgcgcggggccacgaaatcagcgccggactgggcggtgtcttgcgggaaggtgtaggtcaggcgtgcggtgtagacgcgcacggccgaggcttggtccgcgaccggctcggtggccactgggtccagaaaatcgttggtgtagccgcccgaaccggaggccttggtgttggcgatgcaggcggcgagggtagtgccgtggccgtccgcggcgcagcgggacaccagatagtcgcgcagctgccgggacgcgggcacgatggacgaagcgaattcgttatgccagtactgcccgttctgggcggatgcgccaatgcgcccgcccatgatgtcaagcggataatgcacgccgagcacgatgcggttgttgccggcctccgaagtgcgggccatgatttgcggcgcaagttcgggaatcatgccggccagcgcgataccccacgaataggcgccggtagtgtggccggaggggtaggaactgtttttctgcaagttcgagtagccgggcacgtgttcgagccatgagggcgattgcttgatgtcaagcgtggcgggcagtccggcgagatcgttagtgccgccgtagctgctttccgcacggttcagataggggcgcggatgcatggccgcacgttttgaggcgtaggtggaggccacgttaaaggagaagatatcggcgacggcgttgagtttcccggatttgagcccttcgctcatatatttgccaagcaccggaccgagcgcgtccggcatggtttcctcggcttgcagatcggagtcgacgagtgcacgcttgcgttgggcgttcaggccatccttatcgagattttcggcggctttgtggttaatggccacggccaaatcttcgtcgagtttcatggtatcggcgtggagcaccttgccaccgtgtccggcatcggtgggggcctgccaatagttcttttcgtagtcgtagagcaatgccacccaatccgggttgggcagctggtcggcctgtgcgattgcaggcatcgcggctagcgtggccgccaacgccagcggcgcaatggtcgcaatagcaaaaacggaggataggtgccggaacatcttcatatgttccaacctatcctccgtgaaggctacgtagccggagcccagtcaaacactcagtaaattcttcgtgctggcttagcggcgattgagctgaccgtcaggcctctggcttgtcttcgggcttgcggaacgccgggaattcgccggtctccgggtcaacctgtgactcgggctgggtggtgtcatatccctgttcgtagcgggtgcgccgccagttgcgaatcgaggcgttggtgccacggtgatgcacatggtatttgcgcggcgtaccaccaagcggcagctcttcgacctccttggccacagcaatctggttgacattggacgggtcgccggcggcgatcggcgccagcggctcgggttcggcgggcgcggccgtacgctgctgcatgcgcgcgggcagccattcggcgagcctcgacagcagccagcaggcgatgaagtaaatcaccgcggccatgaccagcgtctgcaggatgttgaagtacatcgaaccgagtcggcgcgattcctgcagcaggtcggtatacatgatgatcgagcctagggcggtgtccttcaacaccacgaccagctgggtgacggcggccggcagcatggcgtagacggcctgcggcacctcgatctccatcagcgactgcgtttcggtcaggcccaaagcgagcgaggcctcacgctggccgcccggcagattgccgacgccggagcgcaccagttcggcgaccaccgaaccgttgtacagcaccaaggccagcaccacggcccaataggacgggctgggcaggcccgcgaacgcgaaccatcgccagaagaagatcatgagcagcagcaccggcaccgcacggcagaactcgacgatcacggcggaaacgccacgtaccagcgggttcggcagcagtcggcccacgccgaacaccaggccgaacaccacggcacccaccacggccacgacggtggccttgatggtcatccacagtccgggcaggtagaaatcggtccacgcttcacgttcgatggcgggcttccacagctcccagctgagctgattctcgccatccggcgggttgtgcaggcgcatgaggataagcacgagcaccaccgcgaacagaatgcctgcgatccagttgacgatgcgaatggtgcgccggcccttgggaccgggcgcgtcgaacagcacggaattcgaagtatcggccatatccgtcacctccttacggcgagcttgttggacaggtacgtggtgagcatgccgatggggatgatcaggatcacgtagccgagcgcgaagatcaggaagatctggatgatcacgtcggggcggaattcgatcatctcgctcatcagcgaggatgtttcggtggccacggatgcggcggcggccacggtggagttcttgagcagtgcgatcagcgtgttgccgagcggcgccacggagcctcggaaggcctgcggcaggataatctcagtagcggactgcatgaagcccaagcccagcgcccgtgcggcctcggcctggccaatcggcacggtgttgatgcccgaacgcagcgattcgcacacgaacgccgccgtgtacaggctcaggccggtgaccgcgagccagaagaagttcgtggcgaaggtgtcggagaagctgagcttcagctgcgcataggcacccagcaccatgaacaccatgatgatggtcagcggcaggttcttgaacagttccacatacgcaccggccacggccctgagtgaggaaatcggcgagatgcgcatcaccacgaggatcacgccgaggatcagggagaacagggcggaccacaaggtcagttcgatattgaccagaaacgcaccgagcacgtcatactggctgaagagttccaggaatccgctcatcaggcctcctctccttcgtccgggatgggcgggttgtagcgtacgtcgggcgtgtagttggtgcccttggtgttatcgctgatggcgttctcccacgagccgtcctgaatcatgtccacgatggcgttgttgattttggtggccagctgcgtatcgcccttcttgatgcccacgccgtagtattcctgcgtgaacggtttgccaaccaccttgagcttgccgcgcgaggcggaggccaggccggccaggatgatgtcgtcggtggttaccgcgtccacaatgccggagaacagggcggtggcgcattcggcgtaaccgggctgttccatgagctggacttcggaggcgaacttctccttgacggtggcggccgaggtcgaaccggtgacggagcataggcgcttgccgttcaggtcttcggggccgttgatggagttgtcgtccttgcgcacgagcagatcctgtccggccacgaagtacgggccagcgaaggagacggccttcttgcgctcgtcggtgatggagtaggtggcgaggatcatgtccacgtcgccgttctgaatcatggcctcacgctgcttggagggggcttccttccagatgatctggtcttcggaatagccgagtttcttggcgacgtatttggccacgtccacgtcgaagcccacgtaggtgccggacttcttgaagcccaggccaggctggtcgaatttgatgccgatgcggatcttgccggtttcgtccgcgccgcaggctgccagcgacattgtgcaggccacggcggcgagcgcggcgatcacgcggcaagccttccgtttgaacgtattggtgaatgtcattggattgcgtacccgtctttcagtgggttcgtcagtgggtgaggatcttcgagaggaagtccttggcacggtcggtctgcggatgctcgaagaactcgtcgggcgtgttctcttcgagaatctggccgtccgacatgaagacgatgcggtcggcggccttgcgcgcgaaacccatctcgtgggtcacgcagatcatcgtcatgccttcatgcgcgagttcgaccatcacgtcgagcacttcgttgaccatttccgggtcgagtgcggaggtgggctcgtcgaacagcatgaccttggggcgcatggcgagcgcgcgggcgatggccacacgctgctgctggccaccggagagctgggagggcatcttgctggcctgggagtcgacgcccacgcgggcgagcaggtccatggccagttgctcggcttccttcttgtccatgtgacgcaccttgatgagggccagcgtcacgttttcaagaatggttttgttggcgaacaggttgaacgactggaacaccatgccaacttcggccctgaggttcgcgagctccttgccttcctgtggcaggggcttgccgtcgatgcggatgtcgccggaatcgatggtctcgaggcgattgatggtgcggcacatcgtggacttgcctgagccggacgggcccacgaccaccagcacctcacccttggcgacggtcaggttgatgtccttgaggacgtgcaaagcaccgaagtgcttttcgacgtgggtcagttcgactagcggacggttcgggtcctctttgccgggaaccagcggggtcaatttggccttgcttggcgatgttgtgcttgtcgcgcgcgaacgcactactgtttcattgttcgtttcagacatgagtgggaggatagcacaccgacgtttccaacgtgttcacagtatgtccacacagttgctcagtcgatgtctcatttccgcatcagacatcgtgatggcggcataagcgacttcggcatgtctcccgtttccggaaacatcgcgggaggccgaccgacttttgccccaggatgagttggggccagcagtaggacaatggtggcatgagtctcactggggaaactcgcgctggcagtcgggcgctcggccgaggtcaaggccaccttggcttccggtgctgtcaggaatccctcgccaagcgtggtgtgacgcttttggcaatcagccctactgaagccaaacacaatgcgcaaaacctagtatgccttccctgcgggaagcgaaacatcaggacggcgaccgaagaaccacgaaacacgtattttacaaagcgcctttgcaaaagtcggcatacgaggttatgctgggcagcgatggacggagataccgtccacacgcgccgcaggcgcgtcgacgaaaggacatcatcatgatgagcaagaagaagttcatggcagcggttatgcgtggtttcgaggtcagcggcatgaacgccctcgcccaggccggctacagcgaggccaccaccaaggcattcgaagccatcgaaaaccgctgagtcggaaaacccgagaaacgaacaacagcagtatggatggcatgagccgtcttccctgccgcgcgtcacgcatcgataggatgcatcgccttcgatgccgaacatgatcgcccaacggtcatgtcgataaatcagatgctccaacaggatcggacaacggcgtcccctctctctttgtttcccccgaatccccgtgatgcctacgtgttgaccaccgcgatcgctctgggtcgtatcgcccgccccgtgcaatagtgttttctcccccgttggtttcctcgttgtcgtcctggttgttttcttctgttggcgtgtggtgtcggtgggtggtcgcacgcgcgtcggagggtggtccggtggcctcgcgcgtgtgccagtccgctcccgcccggctgcgccgggagtccccgccggcggggcgggttccgtggcgtggccggcgtgtgtgggttcgggtataagaggacccccggggagtcttacggaatccttatcttggagcgggcttcccgcttagatgctttcagcggttatcccttccgaacgtagccaaccagccgcgccactggcgtgacgactggcataccagcggagtaatttggcaccccttggcaggtatttggcacattgggccccacccgcaaaaagcaaatggcccttggaattattccaagggccatttacggctaatagcgccggagcattactcctcgaaaattaatctacgcgtgcggagaccgccgttcgaagccgaagacgcactgaagtacgtcgagtgctgaggaaaggcggtatacgctccgtagattagttttcctcggcgtccgggtcgtagtcgacgccagtctcggcgcgctgctcgtcggaaatcggggccggagcaccggtcagcgggtcgcggccgccgccggccttcgggaaggcgatgacgtcgcggatggagtcggcaccggccaggatggacacggtgcggtcccacccaagggccagacccgcgtgaggcggagcgccatacttgaatgcctcaagcaggaagccgaacttctcgtcggcctcttccttggtgatgcccagcacatcgagcacacgggcttggatgtcgtcacggtggatacgaacggaaccgccgcccatctcctcaccgttgcagacgatgtcgtaggaatcggacatggcgtgctcgggatccttgtcgaacttgtcgatccaatccttggagggcatggtgaacgggtggtgcatggaggtccacttggagtggccgacagccacatcgtcatcatccggatcgtcggtgggcttgaacagcgggaagtccacaacccaggtgaaagcgaacttcttcggatccagcaggccttcgcgggaggcgagctccacacgcacggcacccagcagcagctgggcggattcgcgggaaccggcagcgaagaagacggcgtcgccctcctcggcaccgacggcctcgcgcaggccggcgcgctcctcatcggacaggttcttggcgacggggcccttgagctcgccgttctcgccgaagaccacgtaggcaaggcccttggctccacgctgacgtgcccaatcctgccaagcgtcgaactgacgacgcggcgtggcggcaccgcccttgaagaccacggcacccacgtacggggcctggaacacgcggaacggcgtgttcttgaagtattcggtcagctccaccagcgggttgccgaagcgcaggtccggcttgtcggagccgtacttgtccatcgcatccttccaggtgatgcgcggcagcggcagctggacttcatagccggcggacttccagatggcggcgatgaccttctcggtcatggccatcacatcttcctgatccacataggccatttccatatcgagctgggtgaactcgggctgacggtcggcgcggaagtcctcgtcacggtagcagcgggcaagctggtagtagcgctcgacgccggagaccatgagcagctgcttgagcaactgcggggactgcggcagggcgtaccaggaaccgggcaccagacgggccggcaccacgaagtcgcgggcgccttccggggtggacttaatgaaggtcggggtctcgacctcggtgaagtccatgtcttccagcgcgtggcgggcggccttagccatgtcggaacgcagcttcagattgtgctgcatggacgggcggcgcaggtcgaggtaacggtacttcagacgcacgtcctcgccaggcagcttgttctcggactcattctcaagagcggtggaaacctggaacggcagggcgtcggacttggcgaggatttcgatggtctcggccacaacctcgatcttgccggtggccagatgggtgttctcgttgccatccgggcgcaggcgcacttcgccggtaatctgaatcacgaattcgctgcgcagcgggcgggccatatcctcgtcgtaaatgacgacctgcacgaggccggtcgaatcacgaaggtcgatgaaggccacgccaccgtgatcacggcgtcggtcaacccaaccggcgagggtgaccttctggccgaccagggcctcggtcacttcagtggcatgatgtgttctgtaagccgtctggctcattgtcttgtttctcctcgatttttcgcgcgaatacgtcagatttcgacggtttgctgggcaaccacagtatccggctcccacgacgtgcaatcggcggcaacctgctcgcccgtgacgatgttcttgacctcgtcgccagcgggctctgcgccttccacaccttcggcagcggtggccgggaaccacacgtacggaatgccgagtttgtccgcgtacttgatctgcttgccgagcttggccgcggtgggtgccacgtcagtagcgatgccgcgcgcacgcagttggttcgcaatacgattggcggccgggcggtcctcttcattccacacagcgaccagcacggcggccgggctgacacggttggcgtgagcgccggcggtgtgcagcatgtagctgaccagtcggctcaggccgatggacaggcccacgcccgggtacttgcggttgccctgggaagcgagattgtcgtaacggccaccggagcagatggagccgagtgatgcggcaccgtcgaggaaggtctcgtagacggaaccggtgtagtagtcgagaccgcgggcgatcttcaggtcggcgataacggaaccggggcggatggcggcggcttcgtcgacgatcatggccagggtatcgagtccctgacgagccagcgtgtatgcctcggaatccttggcgatgccgtgagactcgcacagcgcatcgaacttggcggcaagctcggcaccgtcggaggcagtaagctcggccaattcgaggcaggcgcgtgcctgcgcctcggtggcgccacaggtctcggtgagcagtcgggccacctcatcggcaccgatcttgtcgagcttgtcgatctcgcgcagcacgccctcgacatccgtcagaccaaggccgcggtagaagccttcagacagcttgcggttattggcgtgcacggtggccttggggaggccatacgcgcgcagctcttccagcgcggagaccatgaccagcggcagttccacttcatagtggtcgggcaggtcgccggcgccgatcacgtcgatatcggcctgcacgaactcgcggaagcggccttcctgcggacgctcgccacgccacaccttctgaatctgccagcgcttgaacgggaacgccaacgcgcccgagtgctcgaccacataccggctcagcggcacggtcagatcgaaatgcaggcccaaacgctcttcaatcggagtgtcggattcatgtccgacctcctgcaaacggctcagcaggtaaatctccttgctggtctcgccttttttcagcaaagaagcgccggtttccaccgctcgcgtctcaatgccgatgaagccgttgagctcaaaaaccttacgaagcgtatcgataacacgctgctccacaacacgttcggaggggagccactccgggaatcctgatattgatgcacctttagccacgaaatcaatataataggtgagggttgcgtcaaaacttcctggttcgcccgggatgggagacgctcccgcttatgcattctacgctttaaggagctggccatggccgacgaaactgtcaccgaacccgtaaacaccgctgcgcccgaagagcaggcaacgacacccgcacccgaggccagcgcggccacgccggcgccgactccgtcccccgcttccatgccgaaaccgcacgtgccctcccccgccgccttcgccaagaagactccggcggccaagccgcgcgctgccgccccggccgccgccaccgccgcctattccgaggctgatgtcaagaccgccgaggccttcggccgcgtggatgacaacggcaccgtcttcgtcaaggatggcgacgccgagcgcgaggtaggccagttcccggatgtctccaaggaagaggcgttggcactgtacgcccgtcgtttcctggatctcaaggccaagctcgatctgctggccacccgcctggcttccccgaacatcaaggcccgtgaaatcgacgaatccgtgaagctcttgggtgaagaaacctccgagccagccgtcgtgggcgatcttgccgcactcaaggcccagtacgaggagctgaaggctgccggcgaggccaagaagaccgaaatcgccgaggcacgcaaggccgcccaggccaaggccgttgccgagcgcaccgccattgtcgagaaggctgaagcactggccgcttctctgggcgacaacaccaactggcgttccaccgccgacaagttccgtaacctgttcgacgagtggcagaaccaccagcgcaccaccgtgcgcatcgacaagccggaggccgaggcgctgtggaagcgcttctccgccgcccgtaccaccttcaaccaggctcgccgcaagtgggctcaggctcgcgacaacgagcgcacggccgccaaggaagccaaggaagcgattatcgccgaggccaatgagctcaaggattccaccgcttggggtgagacttcccgcaagttcaacgatctgatggaccgttggaagaaggccggccgcgctggccgtaacgaggacgacgagctgtgggccaagttccgcgaagccgccgacaccttcttcaatgctcgtcaggccgatcgcgatcagatcaactcctccgagaaggagaatctggctgccaaggaggctctgctggtcaaggccgaggctctggtgccggtgaagaccgacgccgaggccaagaaggcccgccaggagctggccaagattcaggaagagtgggatcagatcggttacgtgccgcgtgacgatatgcgccgcatcgagaaccgtctcgacgccgttgacaagcagatcaaggccatcgaggatgccgcttggaagcagaccgatccggaggccgacgcccgcaagtccagcttcgaggagcagctcaacgcccagctcgccgagctcgacgccaagatcgcggccgaatccgacccgaagaagaaggccaagctcgaagccgagaaggccactaaggagcagtggctgaacgccatcaagtaagggtctcgccaggtgcccctcagagaggggagctggcagcaaggctgactgaggggagtttacggttataccgcaagctcccctcagtcgtctacggcgacagctcccctcagcgaggggagcttcgtcatatttatgccgttttctcctgccctatactcataacttcaccccatagttcctcagtcacccagcaattggtgtcttacgcctgagtccctaccggtactgcaacaactgccgtgagcccttgatgtgcggccagatattcatgcaacggctggctgtatggcatatccagctcgccgtaattggttccggcacggaaggcggggtaactgtcgccgccctgaagcagatatgaattggacgcgataatcaccaggtcatcgtccgcaatcggtcggccgtcaacggcgaggttcgcgatacgaaccgccgcatgttcgtcggcagcacactcgtcagcgtcagcgttggtatcagcgccggcatcggcattgccgctctcaccagccgtaccgcattcggcataccgatacgtcacgttcgaggagatgccgagccagcgccgctccagtcgcccatcgtcacggtggaattgctcggcgagcactctcttcacatcgcgcccggtgagcgtctcatgcgcggccttgaactgcaaggccatgagactatccacctcgcgcacggtgactttgccatcgccattcatatcaagccgtggagtccgcagactgccattattcgaaaaaccgattaccggcaagcgatttccggcatacacatgcttcatgattgactctcggttcgcgtccgccaccagcacaccgaccgtattcccgtgcttatccgaaccttgtttgtcgaaattcacgccggaggccaaggtgccaatcaccgcactgccggtatggttcgcatatgttgccgccgcctggtaaatatgctgcgcgcgcgatacctcatcgttctcctcagcaccggcagacatccaagcggcttgcgccggatgcgcattaagcccatccacgcccagcacgccgtcaaccgccgtatggctggtgccattgccgaggtcaacgtcggccactcgcaccgtggcgcgacgcccggcaccggtgatgatcaaatcctgcacggccatgttccgcccgaagctgcccgcctcgtaaataggcgcgccacccgcggtcgtaccacgcttgatcgcgtgactgtgaccggtgtataccacatcaacatctcgcccaatatcgacggcggctgaggcatcggcatgcagcaaggccaccaccgcatccacctttccggagcgcttgagttcacgggccacacgattgatcgcgtccaccgcccgttcgtcaagatcggcatcacgagtgatctgcggagtggctaccgagccgagcgcatcagtaagggtgcccacgaaaccgatccgcttgccgttcaccgttcgaatcgtagagtcacgtacgtggctcagcagtccgtcaggcgacttattggcggcagacgcgttggcgcacagccagtcgatgccgttgctgggatcagcgatacgattgttgaaatcggcgacaccgcggtcgaactcatggttgcctaccgccgaaatcgtcaatccccacgctttggccatatccagcgtgggttggtccttctccaccgccgactcatacggggagcctcccaccaaatcgccggtcgataccggaatcatattgccgggactatggctgtcggccacggtgaaggcggtggcgttgtccgcaccacgttcgatatgcccgtgaaaatcagtgatgtcggcaatggtcaccgtacgagtgccggaagatggattatcaccggaaaaaggaacggctcccgtggttccagcacaagcataaggaaccaccagagccgtaaggataagcgctactgcaccaaaaacgatccacgatcgcttgccggtccaccgccggttcttcatattcctgctcacaccagtcacgctagaatcgtcgattgaacggccatgcctagaaaggcgactctcaggtgaattcttagcggcgtcttgggatgggaaaggcctgaccccgtactatcagggtcaggcctttgcaacccgagtcactacgaatgcgtcagcaaggggagattactcgccaaattcctcggcgcagatctcagctaccgcatccacgcacgcctcggcaatcagacggccgcgttcggcgcttgagccggccggattggcgagtccgccgtgagcgggaacgtcaccttggcgcacagggtagcggacataggatttcgccgtggcaccggcttcctcgaccatacggtccatgtgcaccagttccggcgcatagtggagcatcaacgaagtttcggtgacggccgcatgctccaatgcccagccggggaacaccaatccatcgaacaccttgtcgataaccgactgcggaactggatcccaccaattggtttccacgatggtggccactcccccggtttcgcgggtgaccagatcgatggcctcgacgatgaacgcctcgttttcaaaatgcgcgttcatgacgacgatcttggtgaagccatcggcgatgagttcgctcagcacgtcgtgcatttggttgatcactgtcacgccgttcatgtcgatagtgcccgggaacagcggcccgccaccggagagcggcttggacttgtatccatagctcagggtgggcagcacggtgccgtcgatgcgttccgccagatcttcggcgacccgcgtggcaagtaccgcgtcggtgccgatgggcagatgctggccgtgctgttcggtcgaaccgatcggcacgacgacgggacgagtcttcgcctccttgaattccggccaggtcatgtggtccatacggcggttgctacccattgcagtactcctttaggttggtggtggattggatggtcgatgaatacgcccggctccctcggggaaggagccggagctgaggagatcagatgtgattcagatccttgtcggtgttttcgtgggaaaggatcatcgcgaccaaggcgatggccgcaacgcccaccatgtaccaggccggggcgatggacgaaccggtcagggcaatcaggacagtggcgatgaacgaggccgtaccaccgaagatggcgttggccagattgaagctgaacgcgaatccggtgaagcgcacggaggtggggaacgtctcggtcaggtagctggacagggtaccgtcgttggcggtcagggtggcgcacattgccagctcaaccagcagcacgggccagaactgggaggtgttgaggatgaggaaggcaggaacggtgaggacgatgaacgccacacaagcgccgatgagcaccttcttgcggccgaatttgtcggagatgtggcccatgccgaacaccatgaacacgtaggcgaccaggcagatggtggtgatggtgccggactggggggcgtccatgccgacggtgtcagacagataggtcggcaggtaggtgagcacggtgtagaagccgaccgcgttcagcacgcaggctccgaagctgatgatcagagccttgagatggttgtggaacaactcggcgagcggggcgaacatgccgctcttggcagcgatttgaccgtcggcggaggcggcgcccttggactcaagcgcatcgttcatcgactggtagacgggggaatcagcgagcttggcgcggatgtacagcacaatcagaccgagcgggccggccagcaggaacggcacacgccatccccaaccgaccatcgcgctagagttcatgttggtggccatcagcgtggccagagtagacccggcgagcagaccgatagcggtggaagccggaatcagcgagcagtagatgccgcgctttgaagtgggcgcatattcgccgaggaacgtggccgcaccggcatattcaccggaggcggagaagccctgcaccatgcgcagcagtagaagcagaatcggcgcgccaacgccaatcaccgagtaagacggcaggcagccgatcaggaagctcgcaccggacatgaacataatcgagtgggccagtgcggctttacggcctttcttatctccatagctaccccagaacagtgcgccgattgggcgaaggatgaaggatagcgcgaacacgccgaaggtctgcagcatggcgacggtgtgattgtcggttgggaagaacaccagggcgatagtggtggcgaagtacgaataggaggcgtagtcgaaccactcgatgaagttgccgaggaaggaagataccgcgacttttctgaccatggcctgttcttcagtttgcggggtggaatttatcagtcgtgcagatgtagtaatcgttgcagaactcatgatgtcaccgtcctttcaaggatgtgctgttcgtgtgactgaatgagattcaagtgggaatccgtttcgcagcaggtcgaccagcgccgcgatagcctcgactatgcccttgagtatttgctgaaacgtgaatcgtcgattaacccgttcggcgtagaagtggacaggttgcccagtggtgccggcgcattattcaacatgctgttcttgccatgatttcgtgagtttggcggcgaatagcagcatcgaccagttcggtttgtcgttatagtcgacgccgaccatttgtgtcactttgtccagtcggttgtacagggtttgccgtctgatgcccaattgctcgcacgcgccggttttgctatcgaggttgtcgaagcaggcgcacagtgtgtccagcaacaacggagaggcggcgacctcgaatccgatggtctgcaccacgagcatgcgcatcgccttgtccatatcagaggatgcgacgaaacggtcgacgagtgcggacatggtacttacgactcgcccgtatgccggttcatgattggcgatgtcacgcaataccgcgaacccgtcgaccagcgtcaccgtgtccaatgccactcggccatgcaccacgtatataccgtcgccttccagtacggcaagcgcatccatgcaatggcgtccgaatgcggccgcaccgtctgaggaatcggtggtggagcaccatccgaccatcaagtcaccttccagcatgcaggagacggcgcatcccgacagttcttcgaaccgttcgaccatcgtcgatacatggttgatgccttccaccaccgatctgaaccgaaaagcgaatggcatatagatgcatgatccggcaaaacccagcgcttcgagcatcgcatgcgcttcctgcgcctcaaatgtattgacgtgcacgccgtcggccggacccatactcagatgatgcatcatgcccatgcgcgcaccgccgtcaatataaagggcggccaccggagacacgatggtggcgatggcccgacgcatcgtggcgtcggaagtcatggtgcgttgcgtgatctccaatgctcccaccggccgggagcgactttcaagggcgatgacggcgctcgattcgttgccggcatcgaacgcacgacccgctcgagcggccaacagaccgtcaccatcgaaaatggcgacgctttcgccgaacagcgacgcaatggtttcggccacagcctcgatattgccggtacgggacaatccctcacgtaatgaagtggacattgtgtccacctccaattgcaagtgcatctgttcgtgcacgatagcggtattgacgctctgacagatgtcgacaaaaggtacgcgagatttcaaaccaatcaacgtcaacccatgcagcctggccgcagacaccagttcgtccggcatccgcaccacaccctccaccagttcgaccaccagagcggcgacaccagcctgtgccaggcttgctacatattgtcctagcgtgccgtgccaatcggcggcgagcagagcgttgccctcgataatcagcatctcaccgcccgaaaggaagctggagacatcctctcgctcgttggtgaacacccatcgcactggcgtatcgaggtctttgccttcgacctccaccacaggatcggctcgtttgaactgcgtgttatgaagcacactgcgaatcgatacagtcatacaatctgtccattcccccgcggaacaccggtcgttccggttaacctcaccgcaaagcgtgctgttgacaataacctcagttggttacgcgggcagtcggttcacgtaaccgttcggcaacacaccagttgaaggagcgacgatgactaccacactgttcaccaacgcacatatcgccaccggagaacccggaagcacggctgcaagcaccctgccattgcaggacattctcgtcacggatggtgtgttcaccgcattcggccccggactcgcgcaacaatatgaggctcagggtggtgatctggcggccattgaggtggtcgatctgggcggcaaacttgtctgcccaccgttctgcgatacgcatctgcaccttgattacgtattcacggcccgcaagcccggtgcggtgaatgaaagcggaaccttgtttgagggcatccagcgatggagtgagaccaagtccgacttgacggtcgacgagatcaagcagcgcgcgaaaatcggcattaagaaagaaatgctgcatggcgtgcagctcattcgatcccatgccgatgtgaccgacccgaacctgacctcgttaaaggcgctgctggagcttaaggaggaattgaaggatacggtcactctccagatcgtcagcttcccgcaggagggcatgtactcctacgagggcccgcatggcgaatcgggtgccgagctggtggaggaaggactcaagatgggtgccgactgcgtgggcggcatcccccatttcgaacagtgccgtgagtttggcgagcattccatgcacacggtagttgagttggcttcgaaatacgacaagctcatcgacgtgcattgcgatgagacggatgatccgaattcccgttacgtggagctgctttcggcgctggcatataaggctggcattggcccgaaggtcaccgccagccacacctgttcgctgggatcggcggacaacgcctacttcttccacctgaccaagctgcttaaggcggcgcatatcaacttcgcctgcgcccccaccgagaacctgtatttgcagggccgtcaggataccttccccaagcgccgtggcatcacgcgagtcaaggagctcactgaggcgggtgtcaatgtgtcattgggccaggattcaatgcaggacccgtggtacccgttgggcaatggcaatatgatgctcattcttgattatgtgctgcatttggcacagatgatgagctttgaagaaatcgacgatgcgttgaagttcctgaccgtcaacggtgccactacgttgggcctgcgcgatatgtacggcttggaaacgggcaagccagcaaacttcattgtgctggacgccgatagcgtgttcaacgccgtgtatgagcgctgctcggtattgcgttcggtgcgcgccggccgcacgctgtttacccgcgaggagaccatcgacaccggactcgccctgctgtaataatccgacacaaacagtagctccccttgacaggggagctgtcgccagaggcaactgaggggtagaccacaaacgtgcacatcatgtgtgcgcaggtctacccctcagtcagcttcgctgacagctcccctgtcaaggggagctttgctggtatgcgctagctacgctatcgaaacggactactcctgcggagcgtcaccggaatcggcgggagcggattcggccggctcagtggccggagtggcgtcggctggagtctcgccatcagtggcggcaccgtcttcggcgggcttatcggcggcggccggctcctcgaactcctcacccttgaaggtgaattcgccgaggataccctcgccttccgcatccacaatcacgcgctgaccgtcttcgagatcgcccatcaggatcttctcggagatggcgtcctcgatgtcgcgctgaatcacgcggcgcagcggacgggcaccgagcagcgggtcgaagcccttctgcgcgagcaggtccttggcggcgtcggtgagttcgagcgacatatgacggtcgaacaggcggtcgttgagctgcttgacgtccagatccacgatctggcgcacctgcggctcggtgagctgcttgaagacgatgatgtcgtccagacggttcaggaactccgggcggaactgctgcttcaattcggagctgacctggtccttcatgcgctggtagctggactcgttgttggcacctaggttgaagcccgtgttggcggccttggcgatgtctcgcgtaccgaggttggtggtcaggatgatgatggtgttcttaaagtccaccttgcggccctgaccgtcggtcaggtggccgtcatcgagcacctgcagcaacgtgttgaagatgtccggatgagccttttcgatctcgtcgaacagcaccacggagaacggcttgcggcgcaccttttcggtgagctcgccgccttcctcgtagccgacgtatcccggaggcgcaccgaagagtcgcgaagccgcgtacttctcggagaactcggacatatccacgcgaatcagcgcgtcctcatcgtcgaacaggaattcggcgagcgtcttggccagctcggtcttgccgacgccggtggggccggcgaagatgaacgaaccggacgggcgcttcgggtccttcagacccacgcgagtacggcggatagagcgggacagggcggaaaccgcctcgtcctggccgatgatgcgcttgtgcagttcggcttccatgttgagcagtttcttggactcggcctgagtcagcttgaacaccgggataccggtggtggagctgatgacctcggcgatcacgtcctcgtccacgaccatcttgacgtcggactcgccttcgcgccaggagtcttccttctgcttgcgatcggcttccagcttctcctgcttgtcgcgcagttcggcggccttctcgaagtcctggcccttgatggcctcgtccttgtcggcggcgatcttggcgatcttctcgtcgagttccttgagctcaggcggggcggtcaggcgcttgatgcgcaggcgtgcaccggcctcatcgatcaggtcgatggccttgtcaggcaggttacggtcctggatgtaccggctggacagctctgcggcagactgcagcgcgccatcggtgatggtcacgtggtggtggttctcgtaacgggaacgcaggcccttcaggatctcgatggtctcggcgatggtcggctcgtgcacctgaatcggctggaaacggcgttccagagccgcgtccttctcgatgtacttgcggtactcgtcggtggtggtggcaccaatggtctggagctcgccacgggccagcatcggcttcaacatgtcggaggcacccagcgcgccgtcagccgagccggcgcccacgatggtgtgaatctcgtcgatgaacagcacgatgtcgccacgagtcttgatttccttcagcaccttcttcaggcgctcctcgaaatcaccacggtagcgggagccggccaccatggaaccgaggtccagcgagtagacctgcttgcccttcagggtttccggcacgtcgccggcttggatcttctgggccaagccttcgaccacagcggtcttgcccacgccgggctcgccgatcagcaccgggttgttcttggtgcggcgggaaagcacgaccataacgcgctcaatctcgttggtacggccgatgaccgggtccagcttgccttcagcggcttcggcggtcaggttgcggccgaactgatcgagaatggcggaaccggacttgttctgcttgtccgtcacgccgccggcgttggccaagtcgcccttgccgtcaccggtgccggtgccggagttgccgcgaatcatatcgatggtcgcgctacgcaactcgcccagatcgacgtccatcttgatgagcacctgggtgcccacgccttcgccttcgcgaatcaggccgagcaggatgtgctcggtgccgatgtagctgtggcccagctgcagggcttcacgcagcgaaaactccaacacctgcttggcgtgcggagtaaaggggatgtgcccgttcggagccgcgttgcccttgccgatcatttcttcaacctgcttgcgggtggcatccagctccacgcccttcgaggcgagtgccttggcggctacaccctcaccttcgcggatcaggccgagcagcaggtgttcggtgccgatgtagttgtgctgaagggccctcgcctcttcctgcgccaacacgatcacgcgccgtgcacggtcggtaaaccgttcgaacatgcttgtccttcctcaattgacattccgtcctactctaccgattcacgatgacgtttattcatgagattccacgaattgcgccgtgagaggagaagaaaacgatatgctggttctagattcacccgtagtcgattacaaggaggctcgaaatgagtgaagctgcaaccaagcccgacatcgttgtcggtgtggatggttccgatgaatcctttgccgcgctgaagtgggcgcttgaggaggcctcgttaaccggccaaagcgtcaacgccgtgtttggctggacgcattcctgggatatgggatccgaaccggacagtgacgaggcctgggccaaggtccgccacgatattgccaacgagctgcgtgtgtgggtcgacaaggccgctgcaggcatcgacttcgatccggcgaatctgaagctcacctcggtgaaggcctccggcacttcggccctgctgcagatcggccatgattcgcagcagatcgtggtcggccgccgctcgctgagccgtatggcccgctggttcatggggtccctgtccgcttcgctggccgaggccgccgaagtgccggtgaccgtggtgcgcatcgccggcagcgaggatgagaccgtgaccgacgccattgccaacgccctgactccgggagacaagcccgttcactacacgcagcctcagccggtggtcgaggaggctcgccgcccggtggtggttggtgtggatggttccgagacttcccgccgcgcgttcgatttcgcactggaagaagcacgactgcacgacgcgccgctgcatgtgatgttctgctggcagctcaaggatttgggcgttattccgggctatgagaacgccgtggcaccggtgaaggtcggtcaacgccgcgccgaggagattctcgccgagctgatggccaaagccgagattcccgatggcgtcaaggtcagcacaaacgccttccatattcccgcatccaaaggtctgatcgcggcctcgcggtacgccagccatctggtggtcggctcgcgtggcctgtccgggctggacgcgcacttcctgggatcggtgtcccgccagatcgtgaacttcgccgagtgcacggtgactgtggtgcactgattcaccgaaatcggcatggagtgctaacgcacgcctcggtgatgggtttgcagggaggaattctttattcctgcaaccccatcaccatctacttttcgcggaattcggagtttattcttcgtccgccctgttctggcgcagctgctcgatgagatcgatgacggtttcgagttcaggagccacatcgtctgaaggacgagcgttatcctcttcgtcgtccatctcatcatcctcatcatcatcggcaacggtgttgttgaggatatcctcttcggtggcctcgtcgtcagcatcagacttggactcgtcgctggaatcagctgcatcaacatccacaacggaatcggatgcgttctgtgcaacggactcatcaccggcagactgggattgcgaggtcccgtcacctgccgtcccctcagcgggctcagtatcgacggcgttcccgtcaacagtcttctgtgcttcgatatcatcaccggcaggctcgcctgtcttgtcggtttcgccttcggcctcgtcctgggcagccggctcctgcttgcgcggacggttggccaccacgtcgatatgcagatcgtcgaaagcaggcttggactgcacccacagctggcttggctcgggaggttcgatttcggaatgctcgccgcagccgtggtccagggaaaccacgcggccgtcatccggactccacttgttggcgcacacgccgaacatacggtcgagttcgcccgcgagcggcacgaagaaaccacaggtggagcacaggttgccttcggcggttttggtgctcaacgctttggggcctcgcggaccttcataccaacgcttggcagcctgcgcacgacccaacgaggtcaacacgtgacggcgggtcagtcggaaggtctcgacggcgtcgttgacatcctgcagcgaggattcctcgacttcgccttcctcgatgcgctcgtcatccggatcggtaccgatcgaatcggtgggagccagatccgtgggctcgaggcgatccttccaaggaatccacttgggcggcatcaacgcgccctcagtgggaatcaaggaggattcgttgacggtccaagagtcgatctcctcgtcgtgatacagcgtcaccgaccattgccatccttcgtagccacggatattcgcggcgaagcggaagtcagtgacgtgatcctcaagatcatatgaggtaacgaaatcccccacctgatcgctctcgtcggccacttcgagcagcacggcgcgcgcgatggcgtgagggtccggtgtcacgatggtttcggtggtatcagtcatagatcagatcagtcctgtacatcgaattgatccgccaccgcacgcagcaacgtggccagctttttgctgtcggcagcagatgggtaacggtgacggcgcaacgtattaccggccgcatcaagcatcttgatgaggtcctcgcagatggcggccatgtcatccgccttcgggcgggtggccttgaccaagctgggagcggaggcgatcaggcgaacatccatggcctgcggcccacgacggccgtccaccacggaatactccaccttggcccccttgcgcaacgtggtggcgccagtgggtagggcctgagccggcaggaacacgtccttgccttcctcactggtgatgaagccataacccctggctgcgtcaaaccaacgaactcgaccggtgggcattgcgaaccttccttaatcctcaatggaaatagtaaaccgaaggtacagtttacctcacagggcttgacctcacgctttgggctgagtcgcctgagtcttacgctcagagctgaaccaagaagtcttctgtttggcgtccttggttttgccggtggactgcttgggctcaggcgcggcgatttgctcaatcggcagcaccacggtgaaggtcaggcctcccccatcggtgccggtggcgcagataaagccgtgatgtgctttgaccacggattgcgcgatggccatgcccaaaccagtaccgcccttttctcgggcacgggacgggtccgcggtgtagaagcgttcgaaaatcttcgagcgtgattcaggcggcacgccggggccatggtccacaaaacgcaatacggcgtatcgatagccggtctgcatcgaggcacctacttcggcggcgtcgatgaaccgccgcattgacgcgtcgctggcgggcatgcgagcgagctgtcttggatcgatggcggccggcatcacaccgagcgcggcttcagcgggcgaatcggcaggcgtgtagcggtggatgttgcccacgatgttggtcaccacctggcgcagtcgagaggcatcaccgggcagtacgacctcaggccaatcgccttcggcaaggttgaattcggcgggatggttcaaatcgcgcgccggttcgagggaaatccgcatgcggcgaacggcacggtccgggtcgagcgcgtgcaaatcgtcgacggcgtcggtgaccagcgacgagagtttcaccgtgccggtcatatcgatgccgcgcccctcatcgagacgggccaaagacagcagatcctcaacaagaacagtcatgcgctggctggaccgttcgatatgttcgatggactcgtccgcacgctccaaggcaccaggcatatcgcgctgcatcttatacagctccgcatagccatggatggcggccaacggggtgcgcagctcatggctggcgtcggagacgaaacgtttcatcttgtcggtggtctcctcctgctcatggaaactggattctattcgggtgagcatggagttcagcgaggcggccagggagccgacctcggtgttttccggcgcggaaggaatacgttggctcaggtcaccggctgcaattttcgcggcggtcttctcgatgcgcttcagcggcgtcatcgtgtgctggatgatcagcgtggacagggagccgccgagcagcaccacggcgatgccgaccacaatgcagtatcgggtgagtgttttgacggtgtcgatctggtcggccagcgacaagccgatgtacaccacggcccggtccttgccgttttgttggaaggtcaccggcagaatacgccatggtgccctcgccgtgacgatggcggcatggttggcattgacagtggggttggccagtaccttggtgatggtgtcagaggaattggagtttccgttggccgaatcgttctggttgtccgcactgtcggactgcaccgtaatgatctgcttggccaccgcctgcgtagtgaatgcctgaccgagcgtgatgccattggtatcgccataggtaggcagaatcggcaccgatacgataccgtcctgcatctgcggcatcagcggagtcacgaccagaggattgccttctttgtctttggttccgtcggtgtattgaatctgcagaaagtacgagttcggccccgatgagtcattttttgacagcagatcgatattgttgaccaccagttggctttgcgagcttaactgggtgtcggttttctgcagcatgtagttgttcaccaacgcgcggatggagaaggaaatcaccgacacgccgatgagcagcacggcgatggtgcaggccaccagcttgctgctcaacgagatacggtcgatatgccgcatcagcatgtttttcttacgctcgcgctgctcttggaaatgggcggcgaacggcgacattgcaggcatgggattcgtgttcggggcggcgttcggcgtgctgctcggcggtacgccgcctgactgcttatcggggatactcatgagattgcgatacgttatggatggaggcgattagttcttcggttcgcgaatcatgtatccgatgccgcgcttggtttcgatcagcggagtcaccttgcgcttgccgccttcgccgtcgtcgacctcgatgccgtcgactttcttgcgcaggtaggagatgtacgattcgacgatggctgcgtcgccgccccagtcgtattgccagacatggtcgagaatctgtgccttggacagtactcggccctcgttgtccatcaggtagcgcagcagcttgtattcggtagggctcaggtcaaccggctgccctgcacgggtcacgtcgtgggagtcctcgttgatttccaagtcggcgacgcgaataatcgggtcgtcttccacctgttcgcgggtacggcgcagaatggcgcggatgcgagccacgacttcctcgaggctgaacggcttggtgacgtaatcgtcaccgccgacggtcaggcccatgatcttgtcttgggtgtcgtcacgagcggtgaggaacagcacaggggcgttaatgccttcctggcggatgcgacgggtgacggtgaatccatcgatgtcaggcagcatgacgtccaacacgatgagatcaggctgcactttttcgataacctcaatggcttcggaaccggaagcggcggtgtttacctcgaatccggcgaagtgcagggaagcgaccagcagttctcggatggacggctcgtcgtcgacaacaacaatcgatgcttcaataggcttactcatgtttcctagagtgtcgcgctcttctgggcgtttcctgaatgtcatcttggagttcggccttggaatccttcttgatctcctcgcgccgacgaatcaccaccatgaccacgatgatgatgaccagcgccaccaacaccacgcccatgatgattatgcctacggtcaccgtggacgatgaggtggaggcttttttggatttcacgatttgatccatcattgccgttgccgcgccagaccagctcggcgggttttccagtaacggctgctgtgcggcttcggatagcttatcgacggttttgttatcgagaagccacttatcggagttcttggacacgacgaccaccaggttgccgtcattcgaggccacggcaagcatcactgtgttcggcttgggattcatggactccatcacggttgccgcccagtctcccggtttctgttgactattgaaactggaaagatacagcagatgcacgtgtacaccggtttccttctcggttttggcgatggcatccgtgacttcggccgcatgggagcccaggagattttccgtatccgtgatgttctcggtgatggtcacgccgctgtcggtgctgctgctggagctgtcagagctgtcgcctgagttatccccataggcatttgcggttatccacattgcgttcatcgctactgcagcaagggcgcaaatggcgcaaacaagccattttcggaccatattcccgaaggccgaataggacggctccgaagctaggaccacaatagttgtttttccgtcttcccgattcgttgttgacatatcctccaccttaacggccggtattggcaagcggccgccatacataccattaactctctagaaaaggagcaacgatgccccaatatcaggtagattccgagcgaatccaatcatcctcggccgcagtggccacttcgatctcgcaaatcaggcaggccgtgggcggcatgtacaccaatctcaatgccttgcaggacgcatggcgaggttcggcggccacccagttcaccgcggtagccgaacagtggcgttcggcccaacagcagatggaggcctcactcgagtccatccaacgctcgctgacgcaagcctccaccgtgtacgctgacgccgaaatccaagcttcgcgcctgtttgccagctagtttcttggctctcctccctgaggggggctggaatacaaaaaaaggggattcccgaaggagtcccctttcagctcaatcagctagcgatcgtttgcggatcagtagcccatgtcggcaccggcggccggggcagcagacttcggctccggcttgttggcaacgacggcctcggtggtcaggaacagaccagcgatggaggcggcgttctgcagagcggagcgggtcaccttgaccgggtcggtcacaccggcggccagcaggtcttcgtaggtgtcggtggcggcgttgaagccttcgccatcaggcagggagcggacggtgttgatgaccacgtcaccggacacgccggcgttctcggcgatctgcttgatcggggcctcgatggcgcggaacacgatggcggcaccggtagcctcttcgccggtcagggaggtgacggcctcggtcttctcggccttggcagcagcctgaacgagggccacgccaccgccaggcagcaggccttcctcgatggcggccttggcgttacgcacggcatcttcgatgcggtgcttgcgctccttggcctcgacctcggtggcagcgccgaccttgatgacagccacgccgccagccagcttggccagacgctcctgcagcttctcacggtcgtaatcggagtcggtgttctcgatctcagcgcggatctgggccacgcgagcgtcgatgtcttccttggagccagcgccctgaacgatggtggtctcgtccttggagacgatgaccttcttggcgtggccgagcacggaggtgtcgacggactcgagcttcaggcccagttcgtcggagacaacctgagcaccggtcaggatggccatatcctgcagcatggccttgcgacggtcgccaaagcccggggccttgacggcgcaggacttgaaggtgccacggatgttgttcaggatcaaagtcggcagtgcttcgccgtcgacgtcctcagcgatgatcagcagcggcttgccggtcttcatgaccagctcggccacgtgcacgatgtcctgctgggatgagaccttgccggaggtcagcagaatgtacggatcttcgagcactgcggtctggtcgtcagcgttggtgacgaagtacggggcgatgtagcccttgtcaaaacgcatgccctcggtgaagtcgaggtccaggccgaagcggttgttgtcttcaacggtcacaacgccgtcctggccgaccttgtccagagcctcagcgatcttctcgccgacctcagggtcagcggcggagatggtggcggtagcagcgatctggtccttggtctcgacgtccttggcggcagcgacgagttccttgacgatgacctcggtggccttctcgatgccgcgacgcagggcgatcgggttggagccggcgaccacgttcttcagaccctcgtgaaccagggactgagcaagcacggttgcagtggtggtgccgtcaccggcgacgtcgtcggtcttcttggcgacttccttgaccagctcggcgccgatgcgctcgtacgggtcttcaaggtcgatttccttggcgatggacacgccatcgttggtgatggtcggagcgccgtaggtcttgtcgagcacgacgttgcggcccttcgggcccagagtgaccttgacggtgttggcgagcttgtcaaggccctccagcatgccctgacgggcttcctcatcataagagatgatctttgccatggttgcgtattcctccaaatggctaggtataccggttatcactcgcaagcgtcgagtcgtgacgaccagccgtcagctgccgattatcactctcgacctccgagtgctaacccagacattagcactcgcgcccgccgagtgccaacaccatcggcggcgattgcgctttgggcatgaaaaagccccaaccgtcgaaacggtcagggccttcaatgcacatccttgcgtgcgtgttgctcactcggagcgggcttcacccgaagacagcttgacaacatcctttgcctgcgtgcctttgccggacgaagcgggcgtatactccacgcgatcgccttcgtacagcattttgaacttattggtgctgccgtcgtccttgatttccgcgtagtgcacgaaaacgtcctcgccgccgtcgtccggctggataaacccgaaccccttcttggcaaggaagaacttcacggtaccttgtgccatatctggtctttcctttgttcccttgggcgtcgcgacacaaaacctatagggaacgtagaaagaaccgcatcgcgctccccctacctcgcgactagatgacgattgtacagtgacgagggaacaatctcaaccgcagtggcacattttcggtacgaatcattccataggcgtgagaacgctcacagttttcgatgtatttctcgccgatatcaggggcgcatcaacaacgctagttgagcaacaccaccgtaatgggaacggcgagtccttgcacctgctccacagccgaaatgccaagcgtggtcgccacatcctcagcggtggccttatcggtctcattctgataccacaccacggaagaagccggcaatgtgccgctcggattggtcgcctcgacactggtgtaaccggcggtctgcagcacatcggcctgctgacccgcatatccttggattcctgtggcgttgaccacacgcacctgcgtggccttattcacagtcgcgatggcttcggactgctgagactgctgatcggagttttgattctcattcgaggatgtcgtgtcactgtcggtatcggactttgccgaatccgaagtcgagtccttggacgaatcggtcgaagtggacgaggaatcatccttggtgctgttcttggtctcagccttgctggacgaatcggacttggacgtggtcgccgtctgggacgatcctcctattacattcttgtattctccggaaatccatgcccaggccccgacaccgcacagcgcggccaccagaataacgacgatgaacgggcagaggcgggccattaccgaacgagcgccacggtgaactcccaccggtcccttcggaggattgtcgaaggaatccggttcataggattcgtaggtcatcgtgtcgcgtgccataatcgccctttcttcctatcaaaactacccatgagtgtaatcggcaaacaactcatcagtccaccacaccacgccccatgcaccggatatgcacgtttgactacagtggtgagtcatgatcaaaccattgagcgaactggtagagccagggtgggcccatgccttggccgacgtggagcccaccatccaccatatgggcgattttcttcgtgcggaaaacgccgccgggcgcccgtggctgccggcaagccacaatattctgcgcgcgttcaccatcccgttcgattccatcaaggtgctgattgtcggccaggacccctacccgaccccgggtcacccggtgggtttgagcttctgcgtggcgccaaatgttcacccgctgccgaaaagcctgatcaatatttataaggaattggttgacgaccttggggtgcccatgcccaccaacggcgatctgacaccgtggacggaacgtggggtgatgttgctcaacagatgtctgactgtcggcgtcggacggccaaattcacatcagggcaaaggctgggaggaagtcaccgaggccgcgattcgtgcgttgaacgcgcgcacggacgccgacggcaagcccaagccgttggtggcgattctctgggggcgtaatgcgcaaagcctcgagccattgctgaccaatgccttcattatcaaatcgcctcatccgagtccgctgtccgcttcccgcggattcttcggctccaaaccattctccagagccaatcaagccctagtcaccatgggtgccgacccggtggattggactctttaggcaggccaacagtcattgtgagtagttacagtggggggcatgactttgttccccacgcaaccgaacataccttcgccgaccaccgccgcacgaccggtcaccgttcccgcgcccggcgtgtcggctccgctgggtgccgatgacgccaaacgcgcacgtatcctggccgacgccattcgggcgaggttcgcccagacactggtgggtcaggataatctacgcgaatcgcttatcgtgaccttggtggccggcgggcatattcttatcgaatccgtgccgggcttggccaagaccacggccgcccagacgctcgccacctgcgtatccggctcgttcaagcgcgtgcagtgcactcctgatctcatgccatctgatctggtgggcacgcaggtcttcgattttgcgtcgcagaagttcaccacgcagatcggtccgattcacgccaatttcgtactgctggacgagatcaaccgttcgaatgccaaaacccagtccgccatgcttgaggccatggccgagggtgccacgaccatcggcgggcagcgtatcgccttgcccaagccgttcatggtgatcgccaccgagaatccgatcgaggaggagggcacgttcaacctgcccgaagcccagatggatcgtttcatgatgaaggccgtcatgacctatccttcgcccgacgaagaggctcggatgctggccatgctcacccgccgcggctccgatatgatcggtcccgacaccatcaccggcgaacgcatttccgtgtccgacgttgattttttgcgcaaggcggcacgccgcgtgcatgtttccgacgcgatcatgcgttatgcggtcgatatcaccgccacgtcacgaggtgccggctcccgccccatcaagggactgtcatccttggtgcgtttgggcgcctcgccgcgcgccaccatcgccttgacccgtatcggccaggcgaaggcgttgctgtccgggcgcgactatgtggtgcccgaggacctcaaggcgttcgctcatgaggtgctgcgccaccgtattatgctgacgttcgaggcactggccgatggcgtggtcagcgatcagatcgtcgacaagatcgtcgaaacggttcctgttccgtgagttccgattccgttcgcaagaaaatcgaggcccttggcactcagctgagcctgcctaccgtaaggaaggctttgggcgtgctggagggcgaacacgcatccgggcgtcgtggcggcagcggcgatgctatggatgtgcatgcctatgagccaggcgacgaatcccgtcttatcgattggaagaccagcgcccgccaaggccgccccatggtggtcgagcgcgagcgcctgtcgacgtcacgggtctggttgctgatggacgtgggcctggagatgactggcgtatgcccttccggagaacgcgcatggcaggttgccgccaatgcgctgcgtatgttcgccgcactgtcgttgcgccggtcggacgatatttcgctggtgttcggcgatgagtccagtatcacccgcgtgccgttcaacggtgggttcgcgcagttcgaacgcacgctggacaaggcgcttgaccgtgattggaatcatcaccgtaatatcgacgcgctgctggaatatgcgcgccgtatcaaggatcgcgaggcattgatcgtattggccaccgatgagcatgcgatggaggagcggcatatcaccacgatccgtcgtattacccgcacccatccgatggtgctgatcgatgtggcgacgatgaatccgctcaaggccgtctcatcccgccacgctcccaccgacggcttgagtgcacggcgtgtgccggcattcctgcgcaacgccaaggcagcggccgaggtcgatactcatcgcgcgtatatggccgcggctttggaacaggagctcacccgtgccggttcccatatcattcgagccgcatccagcgaatccatgttcgatcgtttcgtcgccctggtgtcccgggcattggcccgcaccacacgcaatagactgggtactgcacccgaactggtcggactgactttggctggtgatctatgatgcacagcatgttccccatcatcccgctcgccactgatcccggcgatctcaggcccgtggagtcgttggccttgaccactcccctgatggtggccatcgtcgcatgcctgttgctggcggtaggtctgatcgcgttgatcatcatgctgtctcgccccgcacgcaaacctcggaacagcgaccgtgcgcgtggcgctcatagcaatgccagctccaaggccgagtggcgttcccgcatcgacgatgtggtggcccgtcatgaatccggagcactgccccggcatgaggctttcgtcgaattggccgtcatcgcccgtgatttcgccggtgccgcatcaggcaaggagcttagttccagtacgctgaccgatttggcgtacctgaatcgcacgcccgcgaatcgccaaggattggacgcattgaagcagaccattggcgcgttgtatccaccggaatttgccgatgatgcccgcaaccgaatcgcccagacgaccagcgtgcagcaggccgccgagtgggtggcgaatctggtggaaaggtggcgttcatgatgctggcatggcattggccttgggccgctctggccggcgtcttggcgacgctggcgattatcgtgctgattgtcgtgttcgcccgccgtaacgccgccgacgacacccctgtattctcgatggatgacgatctcaataccgagcacgcttcccgcctgttccgtcaatggcgcgctttgggccgtctcgccatcagcgtgctggtgcttgcgctggcgctggccattgtgctggtggctcgccccagccaagtggacgccggtgacgaacgcgcttccagccgagatatcgtcctgtgtctggatgtgtcggggtccacgctcccctatgatcgcgaggtcatcgatacctatttggaactggtcaagcatttcgagggggaacgtatcggtttgagtatcttcaactcgacctcacgcacggtgttcccgctgaccgacgactacgaactggtcaccaaacagttgacctccgccagcaaggcgctgaaaggcgtcgagtcgcaggatgacatcgataagatgtccgatgccgaatatcaggacatcgccaattggctcgaaggcacgcagaaccgcaaggacgccacctccttgattggcgacggcgtggtgtcttgcgcggcgatgctccccggtttcgcttatggcgaagccaatcatgcgaatgccgaccgtcagcgtgcggcatccatcgtgctggccaccgacaacgtcgtgtcgggcaagcccacctattcgctgaccgaagcgttggacttgacccagcagaccaaaatcaccgtggacggcctgtattccgggccgaaagccagtgaatcggaccaaaccacaacggatatgaagtccgcgatcgagtcgcatggaggcatcttcctcacccaatcgaatggcacgtcgatagatgagctggtacgggatattcagtcacgtagagatacggatgtggagaacaaggcgaaatcctcaatggtggacgctcccggtctgtggacgcttgctctggccgtgatactcattatctggatcgtatgtgcatggaggttgaggcgatgaacggattcaccttctcccccgccttgggctgggtcgccggcggactgctggcggccgggctcgccgtactggccattctcgaaatcgtattgtttgttcgtcgccgtgcttccagtgacgagaccgcgtgggcttgcgtacgacgtacgctaatgctgctcatcgtcgcggtgatggtactgactcccagcgtggtatcgtctaccacctcacaggccatcaatgccaccgacgtcatcgtggcggtggataccaccgggtcgatggcggtggccgatgccacatacgggtccgagaagaccattacccgcatcgatgccgcacgtcaggccgtgcatgatgtgaccgccgcttatccggacgccagtttcgcggcgttacggttcggtgcttcgggaacgcttgatgtgccgctgaccccggatgcgccggccatcgataattgggccaacacgttggcggtggaagccacatccgtgtcggcgggctccagtctggatgctccgatcgatcaattgctgctgaccgcgaagtcgattcgtgaagcgcacccggatgatgcgattgtgctgtacctcatcactgacggcgaacagacctcgaatgtgacgcgtcgtacgttctcgtcactgcgccagtatctcaatgatgggtttaccgtgggcgtcggctcgaccgagggcggcaagattcccgtcatcgccgatggcgtcagtgccggcgattccaacaccacggaccactgggtggtcgacccggataccggcgaacccggcatctccaagatggatgagaagaaccttaaagacattgccgacgagatcagcggcacgtatgtggccgtgaacgcttcacagactttggcggattcggtttcggccaagtcatcgaagcagtggcgcatgaccaccacggtcaaggagcgcacacgcaccacgccggtggtatggccgctggccattgcgttggcgatattgcttgccatggaagtcggtgcatggatcgcaacctcaaggagactgctgtgagaaacagtaacgaaatccacgagaacgatggctcggcgaatactcggatgcgggcgaagtgccctctttgggcacgtatcgtcctggcttgtggcgccgtattgctgttgctggttgccggcgtggcggcagtaaacctgtccgcttcgattacgttcaatcaggccaccgcatcattgaacgccaatatcaaagcggctcaggacgagtccacggatatcaccacgctcaaggcgcaacagcagcagaccgatgcgcaattcgccgaggccgggcgaatgcgtacgcttctgttgccgcaagtcaaggacgccatcgacaccaatgcttcgatttcttccgagctgacgaagattaccctgaaacaggccgaggcgcagaacagcggttccgattccgggcaagcccagtcggcgcagcaatccgagagttcctcagccaatgccaaaaagggcggcgcgttgaccgacgagcagaagaagcaggtcgaggagctgatgaaggccaatcagcaatccaccgatacccagtcgaacaccacccaatccaagcagaaagcgacgcagaacaagggtaccggggccaccaagccgtggtaagcagtcgttcacggttgctcttttttctcacatcctcacgggtcatggccttatcgcggctgtttcccggtttcggctgtcggctttggcgtttatccaattcgatagcccatggctgatccaaggtgtgcccaaacaggctatttgtggataatcgttacggctatacacaacacttgtgaataacttcgcccaaaatcggcaagctagaaccacattggtcgttccggctggacaagcatgagtcctgtccttttagctggatatatgaatacctataccagcaccccagcacccatcgatcccaccggcggctttgccggcaatacggtgacgccgttcgattacggcacttgcccttgccatgcggcggtacagcgtagtcgcgacctcgtgtccgtccagcgtgcggccacactggcgcaatcggaccagacggcggtggccgtgaaccgctccagcaacatcgtgtggaccggtaaagccgccgatctattccgatcgcggctcagtcgcaccgcacagtattcggccagtctcgcgcaagacatggagaccacccaccgattggcttgggggtcgtcatgagcgagcacgattactggcaagtggaatcgtccgtttacggcggagtgggatatgcgccagccactcttgaagaatatgccgccatagccaaggctctcgatgacgaggcggcaggatttgcggccatagccacggcttgggaatcggccgcattacagttgcagtcacatcggcatagtgcgccgatgtgcgtcaccttgcagtcgggcgatccgagcgccgttgttcccggccatgtcactgcaccatatgccgcgctgggcaatcggtgttatgaccatgcaacggcatgtcagcggttgagcgatgatctgcgtggcgcggccgatctgctgattcgcgcacactctctgtattctcaggcggagatgacggctcggcgcatgtttaccgaattattgcaggccggcacacaggccaaaccgggatatgccgcggcgggtgttgccgctgtggcggcgggcggctttctggccggctggactattgacggcaaaccgaacccggcatggatgtccacgttcacctatccgttccaggaaggagtgcttagcggcgcgggcggaatcattggcggcgtacctatcggcaagagcattgcgcacaccgatgaggtcaacaaggctgcggggaaaatcgccaatttctccggcccggcgaaagacgtcgtccaaggcaatcatctggacgtgcgcgaggtgcaggcgaatgccgacgttgtccgcgcaagcggatcggtggccgagtcaatggagaatctgcgcaggctcgccgaagagcggctcggcaaaatcgagctgaacagcggactcgaatatgggaccatcgccattcaacgctatgaacgatctgatggaaccaactcctggctggtcaccatcccgggtaccgatggacagcctgactcaccatttggctgggcgcagaacgtggaactgatgagcgccgatcaggagcgccgcaggaaagcggacagcgctcgcatggttgccgaggcgatgcgtcaggcaggcatcggcaaggatgagcccgtggcgctgatcggccattcccagggtggtatcgttgccgccacgcttgcctcggattgggcggaggaatataccatcgagcatgtggtgacagccggatcgccggtggccaatcatccgattccgcaacgcacgtgggtcaccagcgtggaaatcgatgatgaactggtcgccgcactggatggtgccgccaacccggtcaccgataactggctcaccgtacaagggcatgtatcgcccgcgcccgcggcaacaccatccacagtgcattcggacggctcatgcactcccggcgcaacgcccatcaccggtctgaccccatatgacgccgcacccgtggctggttcgaccaacggcagggagttgtcgcactggatcaaataccatcaggccgcctatcagaacgccaccgacctcggctcccccgccgtgcaacgccacgaagcccatttccaggaagttatcaacggagagctcaaggaaacccgctactaccaaggccgcatgacccagtccgcgaccattgcccctagcgagcgaaccaccgagttcagcacgttcggcggttaaaagtaaataccacacttgacagagttgtcaagaaaggagttaacaatataatgacgagtaggagatggctcatcaaactgatgaagcaagcggcagaacgcaagaatgtcacgtttgaaagtatcaggcaaggagggagtcatgagatattccaactcgatggacttatgattccccatcccacgtcataacgaaatcgacaacaacctcgcggacattatttgcaaagaagcagaagccaaactcgggaaaggctggtatcagcagtgaaaacatatcaggtcatcgttcgtcctggcgaaaaatactggattcttgagattcccggtatcggtttcacgcaggcaagaacaacagcagagattgaaagtatggcacgcgaccttatcaccgtcatgacacaagatgctgatttcgcactcaccgtagagacaaagctgccgcaatccgtgcaggagcatcttgatgaagctcggcgactgcgcaaggaagaagcggaatgcagatcgaacgcagcgcgggaaactcgcgccgcagcacaagaactacatggcatgggtctcgccctacagcaaataggcgatatactcggggtctcacggcaacgggcacatcaacttgtcaatgcttagcatcaatcggctaccccacaatgcaatcaccgcagagacgcggctagcgccactttcccgggattgttgcgctagcatgcccgaaaccccctctatcagcgcaacattcccgggaaagtggcgcgcaaagagtgtcaggcgcgtcgctcgatgagtgcgcggccggatgcgaggcggtcgagcacaccggttttggcgatggccagcatcagataccaggccatcacgccgctgataagcacgccgccggtgacctcggaaatcatgtgcacaatgccacgcgggctgacgaatgacacacccacgtagcgaaacagcatcagatatgtgccgtattccaaggcgaccaacgcaccggatgcaatggaaatcggcagattgaacatgcggtaacgggtcaaggcgaacggaatctcagcgaaaacaccttgcaacagcgccgagataatcacgaagcccaaatcgaactggctaccaatcaccgtttcgaccagcgtgccgataaggttcacgtacagcgccgctccgggtttgcgcagaatcagcaccgccagcgtaccggagaagtaccagacggcgtgcacgatgctggcgaaaccgggcagaatcgcgccgaataccgaagagatcggcatgtacgcgaagttgaatccccagaagatcacgccgcaggccgcacccagcgtggcaccgaccgcgatatccaacggctgccatttcagtgacgatacggcaatcggacgtttcggaagagtatgaatggtggttgcaggcatggtgatctcctagccttaaaggccgcacacagtaatcgaaccacgggcgttccttgacctgtgcggctcgggcgggaacgccgcaccacagtatagccgctcggttcacggctggaagtacccttggaggttatgaagcttaccgatatttcccccgcaatcgcattgaccccactcgacggccgttatcacaaggccaccgccccgctcgtcgaatacatgagcgaacctgccctgaaccgcgaacgcatgcgtgtcgaagtcgaatggatgattcttctggccaacggctttgagggcaacggcaaccagccgatcgttgacggcgtcaagccgttcactgccgaagagcaggccttcctgcgcgccattcccgaggacttcggcgccgaaggcatcaagcagcacgccgctcatgaggccatcacccaccacgatgtgaaggccgtggagtactacatcgatgatcagatcgacaaggctccggccgagctgaccaacatcaacgacgagctgaagaccctcgtgcacttcgcctgcacgtccgaagacatcaacaacctctccatcgcccgttgcgtcaagaacgcgatggaaaacgtgtggaccccggagttcaagcgcatcatcgaccacctcgccggcaaggccgaggaattcaaggatatgccgctgctctctctcacccacggccagccggccacgccgaccacactcggcaaggagctcgccgtctacgtctaccgtctgaaccgtcagctcaagcacatcgaaaaccaggagtacctgggcaagatcaacggcgcgaccggcacgttcggtgcccacttggccgcatgcccggatgtcgactggatcgctgtctcccgcgagttcgtcacgaaccgcatgggcctgacctggaacccgctgaccacgcagatcgaaagccacgactggcaggccgagctgtactccaccgtctcccacgccaaccgcatcatgcacaacctgtgcgtggacgtgtggatgtacatctcccgcggcgtgttcgcccaggtgccggtcaagggtgccactggttcctccaccatgccgcacaaggtcaacccgattcgtttcgagaacgccgaagccaacttcgagatcagctgctcgctgctcgacaccctctccgccacgctggtggaatcccgttggcagcgcgatctgaccgattcgaccacccagcgcaacatcggttccgcgctcggctactccttgctcgccctgaccaacctcatgggtggccttgagtccatccacccgaacacccacgtcatcgagcgtgagctggatgagaactgggaggtgcttggcgagccgatccagaccgccatgcgcgcctgcgagctcaagggcctgccgggcatggataagccgtacgagaaggtcaaggagcttatgcgcggccacaccatcaacaaggaacaggtcgagcagttcatcgaccagcagtccttcgacccggaaaccgccgctcgcttgaaggctctgacccccgccacctacaccggtgtggccagccagctcgtcgctttcggccgctgagataggcgcgatgcgagtctctcgagtccctcgagtccctcgaatccttcgcatccaccacactactgcgctgagtcacaaaccgaaccgcaaactgaaccgaacaaggacaggcgtcaggtgaccatttcatgactactgaacaggatcagtccactacggaagatcgcccgaacaaggcgacctcctccactaccgaccggccgatcgcctctggtgacggccggtcggccagttttgctgtcagcggaccggacagcccggcaaccgacgacagcaacgattccggaccatacatcgacgacatcgctccgcgccgcacgcgcgacttcggcgacctgacccgagccggtctgtcgctattgatggccgccgtggtcatggtgttcgccgtgtatctgggcggcatgacgcgcggcgtcgaatccgacgcgcataccgccgcccaagccatcaactggctggctgctttcccctccaccgtactgacgcagctggccaccacggtcatcgtagttatcgtgctcgctcagttgctcttggcccgcgaatggctgcaagctgcggtgtccgcgctggccatgtttgccggatacggcattgtgtgggtcatatcgacggcaatcagcagtctgaacgatttcaccctgccaatggcactggtctcagccgccacctcatacggctccgggctgttgcccgacatctacgccggcatggcgtccttcctgaccgccgccgggccacgccgcacccgctccacggtcaaatggagctggaatatcctgtatgccatcgctgcggtgatggtggtgctgtcgtggcattcggtcaccggcatgctggtgtcgatggccgccggtcgcacagtgggcatgctgatccgattcgtggtcggcacgcagaacaagggcgtgtggggccaagatctggtcgccgccctgaaaggcatcggactggacaccgcctcgctgattcggcatcaggagcccggcgtcggccacggttcactggccgtcacgctggacgacgatctggccgaaggctcgcgcatctacgatctggataccacggacaaccgtcgtttcatcgtttccgtcatcgacgcgcagacccataccgtcggctatctgaagcagttgtgggactgggtgcgtttcaccagtgtgtccatccgacgtgaccgttccgtgcgtgacgccgtccagcatcatttcgccatgctgctgggtctgcacaatatcaaactgcccgcgcccgcaccctacggcatcgccgataccgacgaatccgcgattctggtgctggatgcacacaccatcgagctgcccgccaacctgaacacgcttaccaaggcggatgccgtggcctacatgcgctacctgtccgtggcgagccggcgcggctatacgcaccggcgcatcacgccggacacgctcgcccggctcgaagatggcactgcggttatcgccggctggctgaatggcgacagcgcttccggcccggccaataccgcacttgacaaggttcagctactcgcgttgttcgccgcactgatcggcgtgaaaccggcagtcgcggccgcccgcgaagcttggggagacacgacgttgaccacgttggccccgttcattcagaaagtcgcggtcccctcccccacacgcgcattgggcacgtgggacaagcagctgctcaaggaactgcgagaccacatcaacaccataatcgatgaggagaccgccgaatccgccgagccggtgacgctggcccgcttctcctggcgttcgatgatcaccatgctgctggtcatcgtggctgtggtcgtggtcttcacccagctgaagcccgaggaaatcatcaccgcgctgaccaacgccaacccgttgatggcggtggtgacgctcgcgttcggtgcctgcggctggatcggctcgtcgatttcgctcggcgctctcatggatcgcaacagacgagataatacgggcgtgttcatgagtcaggttgccggcggctttgccacagtgtccatgccggccggcgtgggcccctcgttcgtcaacctgcagttcctgcgcaaatccggctatcgcaacaccccggccaccgcaatcatgagcgccacgctcgtggtgtattacgccgtgtacttctccatgctggtgttgattggcctgttcaccggccgcaatatgttctccggcgcgataccgacgaatacgttggtccttgtgctgggcgtggtggttgtggtgctgtccattgcgatgatgattccgccgttgcgccactgggtgacccgtcgtcttatgccgctggccaagacgtatatcaaccagctgctggacgtgctttcccagccccgacagctcacagtcagctgcctaggcgcgctgttccagaacgcgaccactgggctcgctttctgggcggccctgcaagcgttcggctattcatcgaatccgattgaaacgacgttcgtgttcatgctggcctatgcgttgggttccgcagtgcccacccccggtggtttgggcggcgtggaagccgcgctgaccttcgcattcgtggcggtcggcgtgcctcagggcgtggccctgtctgccacgttgctgcatcgcgtggtgttctattggctacgaattccgctgggcgcagccgccatgaagtggcttgatcgtcataatctcgtctgatttgtccgtttttgtccattttgggcttcagaacacgaaatagatgtgaaaagccttataagatgcgggttttcgcaggaacatgcgctagtatcattggtgaaaacgtggacgaagcaaaagtgctcgccccctgaaccaagaaggatgctttatggcatacaacaagtctgatctcgtctcgaagatcgcccagaagtccaacctgaccaaggctcaggccgaggctgcagttaacgccttccaggatgtgttcgtcgaggctatgaagtccggcgaaggcctgaagctcaccggcctgttctccgctgagcgcgtcaagcgcgccgctcgcaccggccgcaacccgcgcactggcgagcagattgacattccggcttcctacggcgttcgtatctccgctggctccctgctgaagaaggccgtcaccgagtgaccttctgctcgtagcgattacttcgagcattactgacgacaaagaccccgaccgagatggtcggggtctttttgttgtggtgctgtgacgtgttgtccaaccgtattattccggactagttcagcgcttccataagctgctcgaatcccagggtgggctcggcctcgaagggatcgaggagtatggcttcccggcgttcgggggcggtcagggtcaggtgggtccagtcggcggagaactgggccccgacgttcagggccgcgtccacgaaccggccacgcagggcggcacgggtgtcggtcggcggattgtgcacggcgtattccacgttgtctcctgtcagcagctcacgcatctggttgcgggctacgagcgaaccgtacaggcgaccgttggcgatgtcgtggtagtcgagctcaagctgttccatctgggcgaaggtgacgtccgggcgacggcgtttgagcgcgtcgaacagacgcttcttggcggcccagtccacgcggtcggcgagcgcatcgtatgtaccacgctccagcgcgtccagaacgcggctccactcccccataatcgtgtcgatcgtggtggccggcagcgaacttgccagcgcatcgccatgggtttcgatgaaggccttgaccgccgcataataccggcgctgcagacccagtgcggacacggattcgcctgattcgaacgtcagttcggcgcgcggattgtcaaggaatcgactgaccgtgcgattggcggcagccggatcagcaaaggcatactgctcgaatccggacggaacgccatggcggaaggcgtcttcgatcgcgcacagcacaaggtgcgtgacggcaagcttcatccatgtggaccattgcgaacggttcgagtcgccgatgatcacatgcagccggcggaaggagtcggggtcggcgtgcggttcgtcgcgcgtgttgaccatcgggcgggagcgggtggtggccgaggagacggcctcgtccaggaagtccgcgcgctgggtgatctggaagccgtccggggtcatgcggccggcaccggtgtacagctggcgggtgatgaggaacggcagcagctggtgttcgatggtctccaacggcacgaagcggcggaccaggtagttttcgtggcagccgaaggcgtggccggcggagtcgacgttgtttttgaacacatggatcgtggcgtgtgcgccgtaggattcgcgcagcttgcgctgggccttcagggctaggttgcgcatcacgtgttcgccggcgaggtcctgggccagggcctcgcgcggatcgcgcgcttcggcggtggcgtattcggggtgggatccgacgtccagatacagacgtgagccattggccagatacgtgttggtggagcgggaacgggagacgatgggctggaacatggtcatcgccacctggccggcgtccacggggcgttcggcaccggtgaccgccacgccgtattcggtttcgacgccgaaaatacggcagaacccgtccatctcggcggatggtacgggttccgtggcgtgcagggagcgggtgccgctgtcacgcagttggggcatcactcgccgcctttttgcacgaagctgttgacgtattcctcggcgttggtttccaaggcggattcgatgtcgtcgaggatgtcgtccaacacgtcggcttggtcggtggactcggtttgggcggcggcctgcgtggtggcgagggcgtcgtcttcctgggtcgcggcctgctgtgcttgaggttgttcgaattgttgtggcatgttgtcttcttcttgggctgtcaaactcctctcagtcagccttcggccgacggctcccctcacccgaggggagccggaggagtcaaaaaattatcgctggttgatggagtcgagccacggatactgctgcaggtaatgctgcagttcgcggatgatgagtccattggaggccactacatcgttatcgtgacgccagtggatgcgttcgccgtcccaacggctcagcgtgccctgtgcctcccagaccactacggtgccggcggcgatgcccgcgatatcccacacgtgcagcatcggctcgaagtaggcgtcataggtgccgtcggccactttgcacaggtcgagcgagacggggcccacgcgcttgatgtcggccgggcgtccggcgagcgaggaggccacgtcgagcgcacgctgcgattcgctggggatgaaggacatgccgtagctcagcacagaaccatccagcgaggaggtcatcgacggcacgaccttgtcgcgcttctcgccgaccgcggttttgtggatgcgcacggcacccgctcccctggcggccaggtaggtcaggccgagggccggggcgtgcacgatgccgatgatcggcttgggctcgttgtccgggccgaattcgaacagggcggcggtcaccgtccattcgctcatgcgacgtacgtagttgatcacaccgtcgatcttgccgatgtaccagtaacgctggccagggcggctttcggcggggcgggtggtccagaagccgtcgaagtgggcgatgtcggcgattctggcgctcatgaagcgcatgatcttgttgtccacttcaagcttgtagcgggggccacggtccgcgttctcggtgctcggctgggcgaggttacgcggattgagttggtcgtggagggcatgctggccggcttcttcgagcaggccggcgactttgagcgcaaggttgcgcaggtcctgtggggtctcttcgcgtgtttcttccatagctaccaagtctatcgttcggcgttgatggccagcgacttcagcagatcgatggcgtgttcggctgaattgagttcggtttcgcagtgcgccttggtgaaggcgagcggatcggagatgtcgagggagaacaggtgatggtcggtagcggccatatggccggcattgccgtagaattcgaccgcctcgccctcgtctgcggcgcgcgggtcgcgaacagtgagtcgggaccagctggcggcggccacctcatcgccgaattgcgccacgagttttgccctgagccaggcgcgggtgtcttccggcggttcggtggtggcgcgtgcgatgtcggcggcgctcaccacccgttcggtgcggggttcgagtttggtgaagatgctgtccgcggggtcgagcgccgcccatttcaggtcgatgaccttcagtcgcggatcattccatccgttggccacgccgggtgcggacgttgtggtgattttgcggcgcagtttttcgagcagctgccatttgagcagccattcgatgcggctggcctcgccggtcatggccagacgttcgtcatcgtcggcggcatggcggatggaggcgcagtcgatgagcgcctgctgccacatcgccataatggatgtggtggatttgtccggccaggcgggttcgccggcggtgtcggtaccttcgaccagtgcggcaacctggtagacggcttggcgcagtttgagctggataagccatgcgttggtttcgccgccgttggccagcggcaagattgcccccagcgtcaggtcgcgggaaacggtgtgtatggcctcgactgggtcagacagttcgagttcgtcgaggaaggcgttcaggtcgaatccggcctcgtccgcatgttcgagcagccacagcagcatgctcgtggtgccgagtttcagtgcctgcggcacctccatgcgattggcgtcgccgacgatgacgtgcagacggcggtatgcatcggtggagtgggattcgtcgcgcgtattgatgatcgggcgttcgaaggtggtttgcaggccgactttggcgtggatgtagtcggcgcgctggctgagctggtagcccgggatctcgctgttctcgccaatccctacgcggccggagccggcgtagatctggcgggtgacgaagtggagggtcatcaggcgtgtgaccaagtcgaatggcaccgcgcgggccatcatatagttctcgtgcgtgccccagcaggagcccttgccatccacattgttgcgatgcagggcaatgggagtgccagtctgtttgcgggcgtgttcggtggcggcctgcatgatgaggtctccggcgtggtcgtatcggaccgcttcgaacgggtcggtggtttccggcgccgagtattcggggtgggcgtggtccacatagacgcggccgccgttgggggcgatcacgttggtgatgttgagctgcggggcgtcggtgagcatgtccgggcgggcggcggcgcgttcgagacgggtgccgcgcgcgtcgttgaccgggtcctcctgccggtagtcccagcggatggatttgctgtggctgtccgcggcgccattcaccacgtcgaaggacagttgcaccggattgtagcggtccggggtgttcagggataccgcgtattcggtttcggtgcccatcactcgtttaacggtcatgtagtgctccttgagcttgagctattcggcggtgcggatgcggcggatcgggtccatgccgttgatgcgcgaccattgttcggggtccacgtcggccatggaatcgcgggtctcgcggtattcgtcttccacggcggcagcgagcagcggcacggtgagtgccacgtccaagccggtttcgatggattccttgaccgctcgggtcttggcccggtccacgatgttcttgagcatcgcgccggagaccacgtcggccagaaacaacgcatgccactggccgttctcctcctgcacgtcgcatagatggcggcgttcggaggttccgtagatgtcatgcgccagcacggcggacaaggcgtgcgcgtcgacgccatcttccagaggcaggtcgtcggtgaggtaatggtccacgatggcgatggcctgattggttttgggccggccgacgcgaatcttgacgtcgagacgccccggtcgcaacacagccggatcgatcatgtccacgcggttggaagcaccgattaccatcacattgtcgagtgattccacgccgtcgagttcggagaggaactggggcacaatcgtggtctccacatcggaggagacgccggagccgcgggtgcgtagcagcgaatccatctcatcgatgaacacgaccaccggattgccgtccgcggcgcgttcacgggcgcgctggaaaatcaggcgaatcagtcgttcggattcaccgacgtatttgttgagcagttccgggcccttgacggacaggaacacgcccttgacatgggtttcggccggactgattgcgccgtcgccattcgaatcgtaaccaccctcgcatagggcgttcgccacggccttggcaatcatcgtcttgccgttgccgggcggaccgtacagcagcacgccctttggcggcttcaaatcgtagcgctcaaacagcgcacgatgctggaacggcagttggacggcgtccctgatacgaccgatctcactatccaggccgccgatgtcggcgaacgtgacatccggggtctcctccagcaccagatccttgtcgccctcggcgggcagcgcttcgatggcgaggcggacggacggatcgacgataatacggtcgccctgattgatgcccgcatacgcgagcgcgccggaacggcggatgagcacgggattgccggaggcgtcggtaacgatcagtcgaccgtcgtcaagtacctgcttgacactgcgaatctggcccacggtgtcagcatcgcgctgctcgaccagcacgagcttctcgttgagcatcacggtggccccggcggtcaggcgggcggcgttgacgttggaggccacaggcaccaccatgcggcgggtgccggaaatgacttcggccgacgcgtgctggatgccgtcttcatcggtgcgggtggaatcgaccttgaccatggtggcgaaggtgagcggcggctgagcgagctgggcgagctgtgacttcgccttggtcagttccttgccggcgcggctcagcgcttcggcgagcgcatggttcttggccatcaggcgatcgttcagcgcggcgagatcttcggtgtcgctcatgcgggttcttcgcttcccttctatccgggattttcggcaacttatggcagtcggcagaccctattcgttgccgtcggcggatttcctgttacgtataacagtacgcacttttcgcaccacgaaccatacgatgaccacaatcacggccgcgatgaccacgtcctcgaacacgccgagcgcgccttgaatcgagcaccactggtcgccgagcaggtaaccggcggaaacgaggatggtgttccacacggccgagccgagcagggtccagccggtgaagtgcaggaagttcatgcggttgaatccggcgggaatcgaaatcagcgagcgtaccacgggaatcacgcggccgatgagcaccgaccatgtgccgtatttggtgaaccagtcgttggctttgctcacgtctttgcggctgacgccggggattttgtctgccgcgagattgatgcgatgcaggcccacccagcgggagatgccgtacaaggtccaggcacccagtacggagccgatggtggcccagatgattgcgcccggcagactcagggtgccgcgtgcggcggtgaagccggagagcggaaggatgacttcggacgggatgggcgggaagatggattcgagggcgatggccaaggccacgccgataccgccgatggtttccatcagcatgatcagccagtcggtgatggtgccgatcaggccgggttcggtggtggtgcagatgggtgtggggtcggttgcaagaatagtggcggctgccatggaaaaactcatagagggcattgtcccaaggttttcccagaatcagaagcatgacgcaagaagatgtgcattttgttgacaagtccgccgagagcgaagttgggagcccggctgattctgcggtttctgtgccgacgctgagcaagcccggcctgctggttatggatgtggactccacgctcattgacgaagaggttatcgacgagttgggcgtggtggctggctgcggtgaggagattgccggagtgaccgcacgcgccatgcgcggcgaactggagttctgcgatgcgctgcgcgcacgagtggccctgttggagggcctgccgatctccgtgttcgacacggtgcatgacaagctgcatttcaccaagggtgcgctggagcttatcgacacgctgcatgaacacggttggaagatcggcgtggtgtccggcggcttccatgaagtggtcgatatgctggcggccgaaggccatatcgactattggatcgccaaccggcttgaggttgccgatgggtgcttgaccggcaaggtgctcggcgaaatcgtgagcaagactgtgaagttacacgccttgcagacatgggcggaccgtttgggtattccgatgagccagaccgtggctgtgggcgatggcgccaacgatattccgatgattcaggccgccggtttgggtctcgcgttctgtgccaagccaaagacccagctcgccgccgacaaagccatcaacgaccgcgacctaacccacgtactcgattacctgcgccggtaaaattttaccgacctcggctccggcacttatagttgagccatgactacttcaggcgcagaacagttgacgcttgcggggctggctccccgcaagcgtcgtaaacgtgcgcctgcggagcatacgccggccgagcagcatcccatagcgcaagtcgtgctggatgtgcaggcgctccacctcggtcagacattcgattacttcattgatgaaaaagacagcgaggccgcacaaccgggtgtgctggtgcgcgtgcggtttggcggtcagagggtcagcggtgtgatttgggcacgcaccgataccagtgatacgccgcgctcttcgattcgctatatcgagcgagtgctaagccccgatgtactggttcccgcttcgatgcgcgaggatatcggtctggttgccaaagcctatggcggcacacgggccaatattctgcgtttcgccgtgccaccgcgcgtggccaaggtggagaccgagcagcggttggccgcgtcgttccgtcggccggtcggcggctcattgccggataatacgcaaggcggttttgccgggcgtggcaccaatcccgatgggaccaaacttgctggctctacctttgccgttgccagtaccgtttcggagggagctgcgcaggggtatcgtcgtctgaccgccaattacgccgatgtcaatgtgcttcatgacgcgcttaccggtcaacgtttccaatcttttgtgtttgattcgttgcccggtgcacaggagtggcaacgaaacatggcatggatggtggccactgcgttgagtgccggtaaggctgccgtagttgaattgcccaccatgcgcgaggtcgaagacctgatgcatatgctacgcaattatggactcaaaccatttgccccggctccaaccggcggatggatgggcgatgtcgccgtgctcaatgcggagaccatgcctgcggccgaccggtaccgcacgtatctggctgtggcgttgggccaggtgaaggtggtgatcggcacccgcgcggtgatgtatgcgccggttgaaggcccggcactgttcgccattctggaggatgccgcctatcagaacatggacggtatgatgccgtatccacaggctcgcggcgtgatgcggttgcgcgccaagtcccatggcggcgtgttcgtggccatggccaatgcgcgcactccgcaaagtcagtgggaaaacaccggtccaggtacagtggagaccccagtgagcggctattccaccacaattcatccgctcgcctcgccgctgaaggacgccactccttgggtgcgttggctcaatcgcgatgaacttgcgcgtcttgccgacccgtccatcggggcgcgcgtgccgcatacggccgtccgcgtgctatctaaggctttggagagcggccccgtgctgctgtccattccgcaagacagcgtcagtgagactctgagttgtgcgaaatgccatcgtcaggcgcgttgtgccaagtgttctggaccgttgcaactaccggccgaccgccgggattccacaccgcgatgccgctggtgtggggctgctgccatcaattggaagtgcccgggctgtgggcatgaacgtatgcgtgtggtgcgcgtgggtgctgcaggcactgcggctgaactggccgggttgttccgcggcgtgccagtagttttgtccagcaagacgcagggcctggtgcgcgatgtggcttgtcagccgatgatcgtcatcgccactcccggtttcgaaccgcgcgtgcgtccggtcagtgccgagcagggatcggctggccatgagtatcgtgccgtggccgtgctcgacgcttggaccagcttgtatgcgttgggcgtggatgctcgcttggatacattgaccgcgtggatgcgtgcggtgtcgttgtgcgcgccgcgttcccgtggcggccaggcgttgattctcggcgaaaccgacccggccatcgcccaatcgctgatgctctgggattcgaggattcttgcagccaaggatcttgaggagcgtgtggagaccggtatgccgccggccgtggccgccgcctgcgtatggggacgccgtgatgcggtgatgacgctgatgcagcgtatcggcgcgctgggcggcgattggacggcctgcggcgagttgcccggcatgttgggcccggtgccgatcgcgcaaccggacacggtcgacgcccgggagctcgaagccacggccgaccgggtgaaggcagtaatccgtgtgccgcagagtcggcgagccgagctggcggcccgactgcaccgggaaaccgctcgtcatgtggcgtcccgcgaacccggcgagcttcgcttccgagtagatcccaaggacctgatctaatcgtcttcaacacgtgaaacgataattacagaatgaacatcgctagaaggaggacactatgaagggttggcctggagagccggatatggattacgacgtgctggtcgcggatggcgaggccgctgcgaacgccggcaagccgatcaccgacgtgatcttcgatttcggcaacgtgctgatttactgggatccggtcgccgtactcatcccccgctacagccagaagaccatcgacgaattcctcgacaacgacatctccggcttctacgatgtcaacgacctgatggacggcggcaccagcaccgacgaggccatcgccatcatgcgccgtgacaagggcgataagtgggcggacatcctcgactactacatcaagaacttccgcgactccctgaccggcatcgtgccgggcgcgcgcgtgctggtcaatgacctgaaggctgccggcatcggcgtgtggggcctgagcaactgggaatccagtctgttccacgtggccgaggaacagtgcgatattttgcagcagcttgatggcaagctcgtctccggttttgtcaagctgcgcaagccacacaaggaaatctacgaggccgcgttgaaccagttcggcatcaaggccgatggcgcgttgttcatcgacgacaaggccatgaacatcgtcggctcgaatgcggccggcatccgtggcgtacgtttccaggatccggtcaagctgcgtgaactgctcatcgccaatggcgtgaacattccggccgtgcagtgagcatcgacatttcaaggaggaccatgctcaaactcgtgttcgccggcacccccgacgtggcggtgccctcgctcaaggcctttgccaccgatccacgttttgatgtggtcggcgtcattacccgccccgatgcgcctaccggtcgcggccgcaagctcacgcccagcccggtcaaggcgacggctctggagctcgggttgcccgtcatcgatctcaaaccccgctcccccgaattcatggaggcgttgaacgacctgcatgcggatatcgccgctgtcatcgcctatggcaatatcctgcccaagaacgtgcttgatgcggtgcccatgggctggtacaacctgcatttctccaacctgccgaagtggcgtggcgccgctcccgcccagcgtgcgatttgggcgggcgacccgaccaccggcgccgacgtgttcaaggtgggcgagggtttggatgatggcccgatcgtcgcttccctgaccatcgaactgaccggccgtgagacctccggcgaactgcttgaccgtctggccgaggaaggcgcgcccatgtatgtggatgcgctggccgccgtaggtgaaggcaccgccacattcaccgcgcagccggccgagagcctggaatacgcgcacaagatcacggtgaaggacgcccgcatcagttggacggacgaggccgaggccatcgaccgtcagattcgcgcctgcacgccacatcccggggcatggaccgaactgtttgcggaagggccaatcgccgataataacgagtcaaccgctaaatccctcgccctgcatattctcgccgcgcaaccggccgaccagtccaatcccaacactccggccgagcttcagcccggcgagctgaaggtgggcaagaagaacgtgtgggttggtaccggcagcacgccgctggaactcacccaagtcaaggcgcagggcaagaaggccatgcgcgccgccgactgggcccgaggcgcgcgcctctcccccgccgcctgcgtgcgataacaagcaatatcgctcccgcccggaagcacagtaaaggcccggcatcttcataaagaagatgccgggcctttcagctatgcaatcggcgatcagtcgagaccggagagcttgttgatcagctccgggtcacgcgtcgcacccttgtcggccgagcgggcgaaggcggcgtacgccttcagcgcctgggagacgtggcggttgcggtgagccacgtagccgtcgccagcctcaagctcgcgacgacgctcgtccagctgctcgtcagtcagttcgacgttcacggaacgggcttcgatatcgatatcgatgatgtcgccgttcttgatgagcgccaccgggcccttgttggcagcctcaggcgccatgtggccgatggccagaccggaggaaccgccggagtagcgaccgtcggtgagcatggcgacctgtttgccgatgcccttgcccttgacgaaggaggtcgggtacagcatttcctgcatacccgggccgcccttcggaccctcgtaacgaatcacaagcgccatgccaggcttcagggtgtcgttcagaatgacctcgatggcctgctcctgggagtcgaccaccagagccggtccacggaacttccagatctccggcggaacaccggcggtcttgaccacgcagccgtcgggggccaggttgccgcgcagcacggcgaggccgccttcgtgaatctccgggtggttgatgtcgtggatggcgccgttggtgcggtcgcggtcgagcgagtcgaacagggtggtgtgcgtccacggctccggggagatgatgtggccaggagcggccttgtacatctgcttggcttcctctgtgcaggtggggcgcatgatgtcccaatcggccagcttggcttccagcgtcgggtagtcgatggaatgcacgttggtgtgcagcttgccggcgcggtcgagctcgccgaggatgccggtgatgccgccggcgcgatgcacgtcggaaatctcccacttgccggacggcgaggccttgcagatgcacggcacggtgtgcgagatgcgctcgatgtcgtccaaggtgaagtccacatcggcggactgggccatggcgagaatgtgcagcacggtgttggtggaaccacccatggccacatccatggtcatggcgttctcgaaggcttccttggtggcgatggagcgcggcagcacggaatcgtcggaatcgtcgtagtactggtgggcgatcttgacgacctgctgggcggcgcgcttgaacaggtccttgcggtaggagtgggaggcgaggatggtgccgttgccgggcagggccaggccgatggcctcggtcaggcagttcatcgagttggcggtgaacatgccggcgcaggagccgcaggtcgggcagacggtcttctcatagttgagcagttcctcatcggagacgctgtcgtcggcggtggcgtacatcacgtcgataaggtcggtgctcttgacggtgccgtcggcgagcaccgtggtgccggcctccatcgggccgccagagacgaacacggtcgggatgttgaggcgcagggcggccatcagcatgcccggcacgaccttgtcgcagttcgggatgcagatcagggcgtcggcacagtgcgcgttgcactggtattcgacggtgtcagcgatgatgtcgcgggaaggcagggagtagagcatgccagtgtggcccatggcgatgccgtcatccacggccatcgtgttgaactcgcgcggaatgccgccggcttcccggatggcctcggaaacgatgcggccgaccttgttgaggtggacatggccgggcaggaactcatcgaacgagttggcgatggcgatgatgggcttcttgcccatgtcgtctccgctgacgcccgcagcacggtagagggctcgggcgcctgcaaagacgcgccctgacataatttttgcagatcgcatttcagtcatggttctattcaagcctttgcgagggacacgccacttgtcaagagtcgaatagtggaattttcaaaaacgtaacgtttctcacacatttttttggaatacattcctctggcgagagtccggtatagggctgacagaagtccccccaaacggctacacttgcttcggttgagatagattttccaatgtttggagataagaacaatggcttttggtactgacccgacacccgacggtcttgcgaacccgccgatcgacgatctgatgaagcacgccgattccaagtacgcgctggccattttcgccgccaagcgcgcacgccagatcaactcctacttcacgcagctcaacgagggcctgctgcagaacatcggcccgctggtcgaataccagaacaatgagaagcccctgtccatcgccttccgcgaaatcgacgagggcctgcttgaggagaccttgggcgaggacgacgccaacgagggcaactgatcgattccgacaattcgtttggattgtttggacagttcgtcgccgaatgatggtgtgagagttctctcacaactgattttgagcgacacacttgcctgagttatcgcaatcggctataactcaacatcgggagcgaataagacgcaaggctcgcgccaccgcgctggttggcacgagcctttatttatgcccgcttccacagtgacaagtaaaaattgacaccgtatcattgtgcctcgcatcccgcggggcgataagtcctgaagaaagggatgatatgacagaagaacatcggcttatttccgccgaatccgtgaccgaaggccaccctgacaaggtctgcgatcaaatctccgacgccattcttgatgatttgctggcccaggattcgtccagccatgtggccgtggagacctccgccgccactggcgtgttcctgatcttcggcgaagtcacgtccaaggggtactgcgacgtgcagtccaaggtccgcgaaaccctgcgcaacatcggctacacctcctccgaagtcggccttgacgccgattcctgcggcgtggtcgtggccatcaccgagcagagcgccgaaatcaaccagggcgttgcccgtctgactggcgatcaggagaccgccgccagccgcgaagagcgttacgaagcacagggtgccggcgatcagggcgtgatgtttggctacgccaccgacgagaccccgacgctgatgccgcttccgatctacttggcacatcgcctcgccttccgtctgaccgaggttcgtaagtccggcgaagtgccgcacctgcgcccggacggcaagacccaggtgaccattgagtatgacgatgacgataagcccgttcgtctggacaccgtgctgatctccactcagcacgatcctgaggttacgcaggattggcttgctgttgagctgaagaagcacgtgattgacccggtgcttgatgaggtgctgggttccaaggtgccgcatgacaactaccgtcagctggtcaacccgactggttcgttcatcctgggcggcccggcggccgacgccggtctgaccggccgcaagatcatcgtcgacacctacggtggcgctgcccaccacggcggtggcgcgttctccggcaaggacccgtccaaggtcgatcgttccgccgcgtacgccacccgttgggttgcgaagaacatcgtggctgccggcttggcccacaaggtcgagatccaaatcgcctacgctattggcgttgccgacccggtatccgtcaacgtggagaccttcggcaccgagcaaggcgtgacgcgcggccagatcgccgccgccgtacgcaaggtcttcgatctgcgccccgccgccatcatcgacgaactcgacctgaagcgcccgatctacttgaagaccgccgcttacggccacttcggccgcacagacgttgagttcccgtgggaaaagaccgacaaggtcgaggagctcaaggccgcgattgctgcggagtgattagggcaggtagaccgtaagaatagggggctttccgctgttgatggcggaaagcccccttcttgtatatgagtctagtgctcgttcttcgtctcgctttgtccatccgtattgtcggtatcatcgatgtcgaatccgcctataagcacaaagcgcctcaacatatttgtggcacgcatgcgtactttgaacaccggcaatggtgtgtgatcgcattgctcgaagaaagctttcgctcgatgtacgtcaatcgaggagcgcagcacatcgaaacgcccgaactcgttgatgttcgcttcatctatacgtttggcaaggaactcctcgaccaccgacctattaacgcccagccgatcgactagtttgtcgacttgctcgttcttctctcgcgcagcatagcgagtgatgtaatcacgtagcgtaatgccggcttcaacctccacgtcgccacgctccacgtcatgcaggaacagttcggcgagtcgttgttcgtcccgcgagagcgcggcaaaggaacggtgtagctgcgcagacatctccgccaattccgggctattctccttgagcgccttcagccatttattgaagttggcattcatgtaatcggtatcgatgagtccggtattgatttcggtaagatagccatccaattcatatggcgcttcgggattattttttacgccatcatctgaatcaccaccgcagctgctattgccatagaacagttctttatagcgttgcgcaagaatgaggtatgtacgttcgtcgatttgaggacgcactacttcagactcgtcatgctcatcattgtcctcattcgcatcgtcagtatccgtactatcgaccttgtattctggggtactccagtcaaagccctgcactttcgcagcttcaaggtaccggttcagctccacgaactccttggcaaacttgcgcctagcctccaccgattccggcaactgcataaggtccgattccccgttatccgagaacacgtcaagaatttcccggtaccgcgtatccatggattttacgttcgccggcaatttctgcacgaacaggtcaagcggccgatcgcccgaatacagtttcaccgctgcttcaatgaagccatgcatggtgtgcggtttgcggtagtaacgaatgacaccgaacggcttgtccggtccgaacagacgattcgtgcgactgaatgcctggatgatgctttcgtagtcgataatcttgtcgagatacaacgtattcacccattttgagtcaaatccggtaagcatctggtccacgacaatgagcaaatcgagctgctgactgcggtttgttgctatgccgccgtacggactcttatgcgatagtcgcgacgaaatatctttcttcatcgccggccatgtggggatgatgaactctttgccgaacgcctcattgtaatcggtgatgatttcagtcagcgcatcttctttgtccgttgctccttcgttgttgtcgatgttgggatcgaacaacgccgttacatgcaacttaggtgcttgctgcttgaacaagtgataatagttgacagcttcaggaatggagctagtggcgagcatcgcatggaatttgcccgcatggctgagcaccgggaactgttcgagaatgtccgagaccaccatgttcggatgcggggagtcgatgccatattggtctcgtccaaggaaatcctcgatgccgctaatacagtttccagcgccatcaaccatcggacccatggggatctcagacttatccatgtaatgctggaatactttggccttgaccgggtcggcgagcgcatcttccgtactctccaccttcgccttgtcgagagccacggcacgtctgacttcagaatccttgtacgtggtcaccatgtacgggtcgaatccgagtacattatggtcacgaatgccgtcggcgatgctgtaccggtgcaagcaacggccgaataccatggcagtggtggaattcttcttctggttttcgtccagaattggcgtaccggtaaatccgaagaacagcgcgtttgggaaagagcgacggatattctgcaacatgtcgccgaatgtggaacgatggcattcgtccacaataaagacgatacgtcgttcagctagctgatccagccaggtctgtgtgacgcctcgctcccctgttttcacgttgctcatcttctggatagaagtaacgatcagagtgtcgttgacattggtgctgttgagtttgtcacgcaaaacaccggtgttctcggtgccttgtacttccgtctcgctgtcggcaaagctgcggtattccttcaacgattgagtacccagctcgatgcggtccatgaggaacacgactttatcggcgtcatgcgaatcggcgatgagttgcgccgatttgaagctggtcatggttttcccggaaccggtggtgtgccatacatagccgccgggtcgtcctggggtagctggccgctgttcccaatcacatttcctcaccacatcagagatggcgtttgccgcgatgtactgataactacgcagcaccttaaggcatccatccgctgaatcagcgatggtgtagaagccgatgagctgatgcgccatgggaatggacagcaggcctgcggtaccggaggtgcctccgatgaacagcttccattcgtctttgccagggttttgcccgccgcagataggctcattgttgtagtcagcccaatggaagtaatagctgggattgaatttgtctacacccggattagcgaagtagacggcgtcatcggggttcatggccacaaaaatctgtactagacggaacaggccggtgaacacaccttcgtgcgcatatttctcgatctgattggttgcttggctgaccggtatgccacttttcttgagctcgatatggatcaatggcatgccattgatgagaagcacgaggtcgccgcgccgcgagttcaacatcttgttcttggctggatagaccggttgctgagcgatctgataagtgcttttgccgcccgcgatttccttgcggtcatagatgtagagactgacttccttgccgaaatgcgccacatcttctttgttgtcacgcgtgatagacacggtacgcccgttgacgaacgaattgagcgcgagcggcgttcgcagggtctcgatctgctcgattatctgggtcatttccccgtccgtcagcgggtatttgccaagcctgtctatgtcgttgttgttgcggtacagtatgtctttccaattgtcgagcaaatcccgctcagttggatagcgcaggacaccgtccttccatccatgctgcttaagcacggtgatgacgttttcctcaaacaccgattcgctatcgaatatcatgattcttctctccccgaacttcccagtgtcctgcctttcgcgagccgacgcgcttaagcaatccacacccaatgagtatttcagcatcccttcgcacagtcgctgatgagactcccgcagcacgcgccatatcatcgtatgtcgcgctggggctcttctctacaaaatgaagaatgactcgctgtctctcggttatctgctcattcaaaccatttaactgctcattattgtcagatatctgctcattcgaactatttatctgctcataatcgtcagttatctgctcattgttatcaggcttggcatccgcctccaacatgagcgtgagtatcgtgcgatcagcttctccgaagttctcttcaatccgtggttcaggaagtcctgcattcgcccatgtggcgaacacatcggggacacccgtaccagctcgctcgcccacatcgattaggctgaacatcttcatgacaagaccgttgcgcggatcagacaccccgccgaggcgcatctgttcaatgccggttcggatatcacccggattctcgaacaccagcttgtcgggggtgcgcctgaccaccactccgcgtacgccatggtaatcggcgttgaacaagcagttggccaacgcctcacggaccgccttatgcatgggggtgtcgtcgacgcggaaaatgccgtcgagcttgaatggggtcttcagggattcggcaagcttgcggttcacgcggaagaagaaatcgaacaggttgcccgaccacatgccatctcccgaatgcacacgatcggtccagcgaatcgccgggtccagagtctcctgatagtcaagaaaaaactgcgggcattcgcgcacgatgtcatagtcgttgccgaacatgagcaggccgccgaacgtgggatgcagcctgccatcctcacggcttaccgccgccgcgccaatggcgcgtagaaaacgctcgtcatcaaggtccgtccatgaactgccctgacgtaccgtgcggaaacgattgcgatacgccctcaccgtgtccatgttgaaatcggcgacggtgagatcgtccaacactttggagtccatcgtctcgaatccctggtcccgaagcatcgccgaaatctcctgcctcgtgcaacgataatcgcccctcaccgcgccggcgataggttcccgcaaagagatcgccgttgatatacacagggcgttcctcgcgcggggcacgcggaacatgaatggccaccaccatgccaccatccgcttcgagcacctcgacttccgattcgatgggcagcacggcgcttaccttggaccggttgctgaccgtgttccaaaagtcctggcgaagatgttccgcttcagttggtgtaagtccaatcggcgcgaaggtaccgtcttcgcgctccttgacaccaagcagaatgacgccgccgtaggtgttggcaaaagcggagtaggtctcccatatgctgtgcgggaggccgcccttcgcggacttcgcctcgatccggttattctcgcgatatgaggcgagcttcgcgatatcgaatagttccatggcgattcctcccctcacacgaacatcttgtcaagcaaggatttcttgatgttctgcagcaattccaacttacgctgatgaagggtgatgaggccatcaaggtttgacatgaaatgcccgattgcctgcatctcggatttacactccggcatgagagttgcgaaagtcgcgaatttagaaatccagtgcctctcatggctcacaggcgtgtaggcaatattttgcagtacctggtatgcaaaatgaatgtcttcgtttttgtcgcgaagagtcagcagtttcatagcagaactcttgactttaaaggggaaatcaacaaaatggctcgaagtcgtaaaatcatcaaaaatgataacgggatgctcagggctcgccatcttaatcccctgcttctcatttgtgtatcccagaacgaaactttgaccggcagtcaaaactggtgtggggaaggaatcgtcatactcagttcccctcacaatatatggctgaggctgttcgtaatcaaacaattcgcccaacttacgctgttcccaagggtcagtaaaaccagcaaagcgaatttcgggtacagactcaccatctttcgggaacattttttcaagcatcgatttttttaagatgacaagcttgtcatacttacgctgatgaagggtgatgaggtcgtcaagataatcaaataaacgggagatagctgcttgttcttcgacagcgggaaatgccaaaaaggtgttcatgaactcatcaacactaatgctgcggccatcgcgaatcccataagtcaccgtcgatagaccggcaatgaaatgttcggacataaaccagtgcttccagaatcgatctgaatgcgatgttggttccttcgctctaaaaaccgtgtatgcaggcgacgttatgccctcatactgcgaatgtgcgaagcccccttgaaatgacctgagatgaacaacgaagtctccgggaagcacacgcttatatccaatttcgttgctctcgtcatgcccgatatatcgaccagaatcatcgcgatatatcatgccttgattctgcgtcgctgacagaacaggcagtgtcggatggcctctatcatcaacgatttggaacacctcactggccttacgctgttcccaagggtcagtaaaaccagcgaaacgaatcgcgggaactttcgcctgttcagtcatcattcgcctcccaacagggtcttcagctcggcaataccggccatatcgaactcattgccggttagttgaccaagcatattgccaagttttgcctcagcctgttcgatctgttcgcacacatcagagtatgtggtcgaatacttgtcgttcagcgcattcaccgctgcaatcaactcatcaacagccgtctgagggagctcctcaagcttgcgctgcaatggttccacccacttggcagcaagcaagtcatcagtatgttcatcgctcagcccttcaataacggtccgggtcttttcatcaagcgctgaacggagattcttaacgttctttttgacttcacgctcttcatcaaacaaccgctgtgcactcacaagagcacggtcaaagtcagtctcgggatgcttgccgatagacttcactgctttcttcaactcagcggcaacaaaagaatcaccatcctcactgatagcaccggttgagctcttgtcgtcttcatccatattttcaagaatgtcggcaatctcaccactaatctctcttaaccgagattcatatgtaacaatttccgcaagatcagcagtaagcagtttgctttgcacaagatcgaacggcaggatatgtccagcccagccatccggcacttcgacatccttaccgcctttcttcttaacaaccatgttggcgtcaactttgcgaacggcgtcatggccctcgctctgtatggtttcaaggtcggtggagatggtcttctgccagctatcgtcaagcacctgatatgccgtataggcatctacgagcggtatatcagtcaaacgatgtagcaggtcatgtgccagaacctcctcttcggcggcaatgctcacgttggcggcgttacctaccagttcatcacgcagataggcaggataatcggtgaatacctcacgatatcgctggatataggcactcacaccagaatcagcattcactgcctcgcgaacatcttgcacagcgagcctggccgaatggccgttctcctcagcaaagagacgttggcgcaatcccgggaacacgttccaatacttaccgagcgcatcgatatcctgcttgggaatgccaccaaacatggtggaatacacgtcccaactttcggcgctttcagaggaatccacatatcggggaatattgagactgtaatcgttctgccgaatctcatcaatgctcaccaaacggctgaacttatcgatatcacgattctccgtcaccacatccacgatgcgtttgatatcgctcgcacgcagcttgttgttcttgccgtccttagcgaaatatttggaggcatccacaacaagcacatggtcatcgttgcggtgcttgcgcagcaccatcacgatagtaggaatgcccgtgccaaagaaaatgttcgctggcagtccgatgatggcctgaatatggtggttttccactagattccggcgaatagcgccttcctcaccgccacggaacagcacgccatgtggcaacacgatggccataatgccatcatcacgcaggtgatagagatcatgcagcaggaaggcataatcagccttggacttaggcgcaatgccatattcgaaacggatatcttcgcccgcttccggcggctcccagttctgggagtagggaggattagagaccacggcgtccacaaacagcggctcataggtctcgtccttcgtttcgtcggtatcgaaccatggccagtcgctttttaacgtgtcaccgttacgagccacaatattgtctggcagtatgccacgcatgacaagattcatacgcgtgagattgtaggtattctccttgagttcctgtgcgtaatacttgatgtcattcggattgccattgcgacgggccacagcctgaccgatatggatcagcaacgagcccgagccactcgtggggtcgtagatgttgatttcttcacggccggcgagatgccaggccactatttcgctcatgagctgagagacttcgctcggcgtgtagaactcaccggccttcttacccgcgttggaagcgaagttgctaattagatactcatagatgaagccgagggtgtcgtagtcctgccggctgtccatcggaatgtccttgatgaggtagatgaggtcgcggacagccttgctacgacttttttcatcggtgccgagtttggacagaccggtttgcagcgtgtcgaagatgccaacgaacacacgtttacgagccggatcaatgttgcgttcgaaagcggaaagcgcgtcacgtacatcagcgatggtgaaatcgccctggctggcaatccacgtggagaacaggttgttgtaggagatgaagtagccacatagatcacgtacatactgtacagtttcggcatcattctcatccaagcccttgaggtcttcggctccccagtcttcagcacgcagacgagcaatctccgtctccgagaggaacttatagaagataaagccgaggatatagtccttgtattcattcgcctcaatcttggaacgcattttattggcggattcccagattttggcggcaagctgctgcttattcattcatatgctccttgtttctgtacacgtaatcaagggtctgtccttgttcattgacccattcggtccaaccgttttgactgccaccgagaacaaatacagcagcagcggaagggcttgacagttcaatgtcatcagcaagagtcgccttgcccgtctgcgttccgaaaagatgctgccgagctgccacggctccctggtttttaataactggatgtacgagatccacttcagaaccggaaagaacagtgaaacgacctgtaccttgactatatcgcccagtggcctgaacaccgttcttcttcgtatggaatacggcgttcaccataaccggtgtcttttcttttcgatcaaggtcatatccgagcactcgcatacgaaagaggatgttattgtgcagtctttccacctgttgctctttgtatggattcatgcgaggagcaggagtatactcattgtcggtctcataagagccatgtttgtccacataatctatggctgttgactcaagagagtccaaaacatcacgatcgatattgacatcattatcgaggaacatgatggctttgttccaaaaatctttcttagtcttgtgcgcatcaagccgactaagccccttcgtggtttgccccacatacgcacggctcagaactccatgatcttcatcaagaagataatacacaccgcgatccggcaaatcgggaagacttttcgcctcactcaacatatcccggggcaccacaaccgtgacaagcgactccccatccacacgacaaattcgaatgccatcaggattgttgtcaataatttgtatggtcatagcagtgagagcaatcattacttgccgccctttgctagttcattaatcatgcatgttctcacgaatgccgaaaagctcatcccgcgaagagatgcggcctctttagcagaatctcgcaaattagcggggatacgcatagtaaccggcaccacatcaccgtttaccagatacgaacgtatctctgtttcaccagcatcatgctcaatcagatcggagtacgtcattgcattctacactttcaaactgcaatacaaatgcaataattctacacccgcttgggaacagcgtaagttgggagagctggcgctgacttattcaggaggcactcccagcgctggcaattctgcttactatggaggcgaaattccttttatccgatctgctgaaatcgattgcgattcaaccgaattgtcacttacggttgcgggtttaaataactcatcagcaaagcttgttgataaaggaatggttctctatgccatgtatggagcaaccagcggagaagtcgctatttcgaagataaaaggggcaattaaccaggcgattcttgccatggatgcatctgatatggcagcaaatcgtttcatagcttactggctccgtagacagaagaaatcaataaccgaaacctttcttcaaggtgggcagggaaacctctcaggcgcaatcatcaaagagctaggtattcctcaaccaagtttagatgagcagcgacaaattggctctttcttcagcaaccttgacgacctcatcacccttcatcagcgtaagcgtctatctattcggcaaaggagccccgtgtggtcataaacacaatcaacgaagaaatgtcgttctgcgattactactcgcaatgggtcgacgtctacaaggaaggcgcgattcgggaagtgacaatgaagaaatacaagctcacacaggcgtggctgagaaaacttatccctgatctcaagctttccgagttcgatcgtgtgagctatcagaaactcatcaacggatacgctgagcatcacgagcatcagacaacaatggattttcatcaccaactgaaaggagccatcctcgatgccgttgatgaaggtctgattcagagagacccaacaagaaaagcaatcatcaaaggaaaacagccgagacagaagaaggtgaaatatcttaaccagttcgaacttcatgctgtccttgctgatttgaagcttgatccgatacctaactgggactggttgatactgctagtggcaaaaaccgggttacgtttctccgaagcattggggcttactcctgatgatttcgatttcgttcaccagactttgtccgtcaataagacatggaattacaagaacggaggtggctttgttccaacaaaaaatgcttcttcggtgcgtaaagtacaacttgattggcaactcatcatgcaattgtccgtcctgctgaagaacttgcctgacgacaagcctatcttcgtgaacggtaaggtgtacaactcgaccgcaaacgatattctggcccggcattgcaaacaagccggagtacccgtgatctcgattcacggcttgagacatacccatgcctcattgctgctgtttgctggcgtttcaattgcgagcgtgtccaagagactggggcatgcaagcatgaacacaacgcaggaaacatatctgcatgtcatccgtgaattggagaacaaagacgttgacatcgtgatgagagccctatccacccttatttagcaaaccacagacgcttacgctgatgaagggtgatgagggagtcgagcttagcaaagaagtcgccaatttgctgttgttcgacggtgcttggcatatacaaaagcatgtctttgatcttgccaaagtcaacactttctacggttgttccagtcttgccaaactcaagcagcaattccttgttatgcgaaataaagaactgaagtagccattctccacagcactcgccttggggcagaatgacgcgaatatcctggttaacagttgaaggtttgcgcagttcagccaccggaagggtatggcgaagaatcccgctcctcgttaccattactaaagatccggcaggataaagagtcaactcttttgcgcccttctcagttatctgagtcgtagttctatcaagataattagatttcacgtcctgggacgtaacccacagcacgtatccatcttcatagttatcgggatctgccattggcggagtatgcccgccgccaaacgttgctacttcactcaacttacgctgttcccaagcgggcatcggcactagatgaagcagggtagacgggatacgagtggctggccgaacatacgcaatacatctaccgacgacttggacactaccatttccgctgttagctacacttatcgcgataagtgtagctaacgacgattggagcgacaccttacaagccatgagaggtataaccgttcccttctattttgaaaaacttgaataagttagattttttcaaaatagggatgcgtcgaaaagacgcataaacgcacgaaaaatgcgggcatccgatatgcagtgttcattgaatcactgtatatcggatgcccgcaattgtttcagaccaattgaagagccttagctcagcatcagcctcacgccttggcgacctcaacggccagctcggcgccttccttcacttcgaaggaggtagccagcgtctcacgggcgatcagatccttgaactgctcgaccttggccacattggcggccggcacggtcagcaccagggcgatacggtccgcgatgtccagatcagcagccttacgtgcgtcctgcacagaacgaatcacgtcgcgggcgtagccttcggccagcaaatcggcatccagcgcggtgtcgaggatcacgaagccaccggtcggcagagcggcggagaccgaagcggcggcctcggtggcgttctcctcctccacgcggttgatcagctcgtactcgccttcgaccagcgcaaggtcgccggacggcgtggagaccaccggcgcaccggacgcagcatcgacatgccagtcgccggacttggaggccttgatggcgaactgcacctgcttgccgaggcgcggacccgccgcacgggcattcacacgcagctcgtgaacaatcttcagaccgtgggcggaggcgtcctccagagtcgagaactcaatattcttgatattaagttcggacttcagcagctcgtcgtaggctttgacggcgtccacgttctcgaccaccacggtgagcttggaaagcggctggcgcacgcggatcttggcggccttgcgcagggacagggtgccggagacgacctcacgcaccttctccatcgcgtccaccaaggccggatcgtcgaccagcacacggccgagttcggtgtcttcaccggtcttctcgtccaccacgaacggccaatcggccaggtgcacggactcgccaccggtcagaccacgccacacggactcggcttccatcggggccagcggcgcaagcacgcgcatgaacgcctcaagcacggtgtacagcgtgttgaacgcggaagcgtcctcattccagaaacggtcacgggtgttgcggatataccagttggtgagcacgtcgatgaagtcggagaccgcatcgcaggcgtcggagattgcgaactcgttcagcgacttctcggcggccagcaccagacgacgggtacgggccagcaggtagcggtccatctccggcagaccggcgacctcgtccgcgcgcagctggcgggcgtcgaatccggccccgccgttggccgcgttggcgtacaaggtgaagaagtagtaggagctccacaccggcaacatgacctggcgcacggtgtcgcggatgccatcggcggtgacgatcaggttgccgccgcgcagaatcggcgaagacataaggaaccagcgcatggcgtcggaaccgtacttgtcaaacacgccgttcacgtccgggtagttgcgcaagtgcttagacatcttctggccgtcggagccgagcacgatgccgtggcagatcacgttcttgaacgccgggcggtcgaacagggcggtcgccatgacgtgcagcaggtagaaccagccgcgggtctggccgatgtattccacgatgtagtcggccgggaagtgctgctcgaacttctccttgttctcgaacgggtagtggaactgcgcgaacgacatggaaccggactcgaaccagcagtcgagtacatcggaaatacggtgcatgtgcgacttgccggtcgggtcgtccgggttgacgcggaccaggttgtcgatccacggacggtgcatgttgatgttgccgtccttgtcgcgcgggtagtcaccgaagtcggccttgagctcttcgagagaaccgtaaacgtccacacgcgggtacttcggatcgtcactcacccacaccggaatcggggaaccccagaagcggttgcgggagatggaccagtcgcgcgcgttggcgagccacttgccgaactggccgtccttgacgttgccagggatccagttgatctgctggttcaattccagcagacgcggcttgatcttggtcacggacacgaaccaagaggagaccggcttgtagatcagcggggtggcgcaacgccagcagtgcgggtaggagtgcacgtagctcttctcctggaagaggatcgcgcggcgctcttccggaatctcggcgagcgggccatcgccggcgcgcaggttgcgcaggatcggcaggttggcgtcgaacacgaaatcgccctcgtagtcggggcactgcgcggtgaagcggcagccatcgtcgagcacgtcggtgctcttgatgcccttggcattcagcgtgttcatatcgtcttcaccgtagggggcctggtgaaccagaccggtaccttcgacggtgtcgacgtagtcggcagtgaagatcgtgtagccgttcgggccgggcacatggccttcggattcggccgtctcgcccgcgaagtacgggaagaccgggtagtagcggcggccttccagctcggagcccttgagttcgcgcacgacctcgtagttctcgccgagttccttctcgtagtgcggcagcaggtccttgccgaggtagaacttcttgccagcgaacttgccttcggtcgggcggacctcgacgtagtcgatgtcggcgccgaccacgatggcgaagttggtgggcacggtccacggggtggtggtccagaagacggcgtaggcgtcgtcctcatcgcgcatcttcacggccacggacacggtggtgtcctggcggtcctggtacacgtcggcgtccatgcgcagctcgtgcgcactcaacggcgtgcggtccttcgggcagtacggcagcacgcggtagccctggtaggccaggcccttgtcgtagagctgcttgaaggcccacatcacggattccatgtacgggatgttcagggtcttgtagccgtgctcgaagtccacccaacgggcctgacgatgcacgtagttctgccattcgttggtgtacttcagcacggaagcgcggcaggcgtcgttgaacttgtcgatgcccatcttctcgatctggtcaaccgagtcgatgccgagttccttctgcgcctcaagctcggcgggcaggccgtgggtatcccagccgaacacgcggttgaccttgcggcccttcatggtctggtagcgcgggatcacgtccttggcgtagccggtcagcaggtggccgtagtgcggaagaccgttcgcaaaaggcgggccatcgaagaacacgaattcattctggctgtggtcgccggaagggttgcgttcaacggacttctggaaggtgtcgtccttgtcccagtagtcgagaacggtctcctccatgttggggaagctggggttcggcgcgacgtgcgcggtctcgccgccctcgttcgccttgggatatacgttttcgctcaccgtaaatctcctagttgtactgtgcactggtcctacaggagcgtcattgatggcgattgccgggcgccgacgtgtgccggctgggttcacgaatgtcacgtaccgaaccgtggggccgattgcgtcaatcgcctcgcagccggaactgactgtgttccgcccggaacagccatgtctgccgttcctgcctacgaggacgatgacgagcgctggtatgcgctccgcaccgcggtaccacctcgcttatcgcaccggttgcgccgctccgaactgttgcactcggagccgcgagcctgcgcgaccgcttgtgttcggctgtctcgggccgatcccgtcggttctactgggcgattgccgccgttcttccgaagactccccgctgataacggatcactgcctcacaacggtgcatatcctaacacgccacgcggtcaaatcgccgcccacggccacggcaccgtcaggagcccgatttagattgggaccggccaccacggaccgagaaaggattgtcggacaatgacgtatgatttcacgtccatcatgaacaggcatggcatggattcgatcgcggtcgacggactgggcaccgacccgggattcgcgccggacccgccacgcgagggtttcgacgtcatccccatgtgggtggcggacatgaacttcccgaccgtgcccacgatcccgcaggccattatcgaacgcgcgcaacaccccgtctacgggtacttctcccccaccgacgactattacagctccatcatcgactggcagtccacgcgcaacggggtcaccggattgacccgggaggcgatcggctacgagaacggggtcctgggcggtgtgatcagtacgctgaccgcgttcgccgcccccggcgacggcgtgctgctgcacagcccgacctacatcgggttcacccggagcatcgaaaacaacggctaccgcatcgtccacagtccgctcacgctggacgagcgcggcgtatggcgcatggattacgaggatatggacaggaagctcaaggagcatcacatccacgtggccgtgttctgcagccctcacaatccttgcgggcgcgtgtgggaacgttgggaaatcgagaaggccatggaagtgtacaaggccaacgattgcgtggtcatttccgacgagatttggtccgatttgactctggggaaccaccagcacatccccacccaatcggtcagcgaggacgcacgcaacaggaccgtggcgttctacgcgcccagcaagaccttcaatctcgccggactggtgggaagctaccacatcatctacaatcccacactccgggaccgcatcgtggccaaaagctcgaaatgccactacaacgacatgaacgtgctttccatgcacgcgctgatcggcgcctaccggcccgaaggccatgagtggctcgacgaactgaaggcggtgctcaccggcaacgtcgattacgcctacgactacatcaccaagcatttccaaggagtgagtctggccaaaccggaaggcacctacatgctgctgctcgactgcgagcagtggtgcgaacgccacggcctgagcctgcccgagttggagaaacgcggctgggatgtgggcgtcgcatggcaggacggcgacatgttccaggccccctacagcatccgcgtcaatctcgcattgcccttgagccgcgtcaaggaggccatgcgccgccttgaccaatacgtattcaacgcgtaaacggcatgcatccgcgattgcggtgtcctggaaagacgaatgccgtcaacgaggttggtgcccgttggcggcattcgtcatacgttggccgaaccgggcgaaacccaagttgccaagttgccgtgcgctatgaggtggatgccgccagcggacgtgtacatctgaccgcccgatatgccggtgccaccgatgcgccgacgctgccggcattcggattggaatggacacttcccaagcagtacgagaacctgcgcttctacggccttggccccgaggagacctatcgcgaccgtctgcacggtggcaagctcggcattttcgagcgcaccgcggccgaagacaatgcaccgtatctggtgccgcaggagaccggcaaccatgaagacgtgcgttgggccgaagtgcttgacgcccaaggacacggcatgcgtatcagccaggccggcagcgaacatttcgcggcgagcctgttgccgtacagctcgctcatgctggaagaggcgacccaccagaacgagttgccgccggtccgtcacacgttcctgcgcctgttggccgcgcaaatgggcgtgggtggcgacgattcatggggcgcgcccgtccatgagcagtaccagctgcccgccgatcgcgcctacacgctcgacgtgaatctggaactgttctaatagcgataaagaagctccctctgacgagggagcttctttatcgtgctggtacgaaactgtcacgcactactagggtggtggagatgaaggtgtggtggtgcagcgtgcgccgactggagatggcctcggcaagcatcgtaatcgcagtatcggccagctcattctgatcgatatcgtaactggtcaatgtcggcgaagtgtactgggcgatggcctggttattgatactgatcacactggtatcgcgaggcaccagcactcccgcagcaataaacgcctgcagtacgccgactgcaatcgtgtccgcagccacgatgaacgcatcaggcatgtcatctcgatgatcgttagccgctttctcccctagagtgcgcccggtgtccacagtgaacgcgccttgcgcgtaaatcaggccttccgcatccagccccaaacgctcggtccaattgcggaatgcggttaatcggctgtcttccgggtattcgtgcaaacccatcgtgaagccagtaccgccgatatagccgatgcgtcgtttgcccgaggacaccaacacatccaatgcgtccaaaatggtttggcttaaatccggttgtaccgaatcgaacaggctgggcgcaggattgatgtcgatgaatacgccatagggcaataccagatggagtttcaacagtttatccgaagagagtacggacggtccgatggaaatgaagccgtcgaaatcaccggcgttggcaatcagatcgtcgatatgggaaaacgacgtgagttccatgtgctgggctctggcattgtcgccgagcacggaccgcagttcatcgaaataggcgtccgccagttcttcctcgcgggtggcgttgtcgagtacggccacacggcgtggcaatgcgatacggcgtgatccggtagcgtagccaagctgctcgctgacctcgatgatgcgacgtcgcgtctcctctttgacggacaatgtcgggtccccattgagcagccgggataccgtggcctgcgagaagcctgatttctgcgcgatttccttcatcgtgaccatagttgagcctccccgccccaatacgcaatactacgtagtatttcagtaaatatctttactacatagtgtaactcacgtcatgcgggtatgacgacgcatggttgcagcatcgtcgacccgcagcgctgtgtgcgcctcctcagtcattgacccgcatagctcatcagacacgagagcagcacagaggagacgttccgggatggcattgttccgacgctgaatgttcccggggagctcattatcagagactcggccgctcctgcgcaatgctgacgattgttcactgttgacgattgttcactgttagccgctcttctccgctcagtccagccggtatcacatccgtatcgcgcccactagcgatatgttccttatatcagtaagggctttctcctatacaaggagaaagcccttacgatgatcagcgcataccgattatgaactcgttactccagttccaccgcgccggtgtacagctggtagtactcgcccttttgcgcgatcagctcgtcatgcgaaccacgctcgatgatgttgccgtggtcgagcaccatgatcacatcggaattgcgcacggtggacaggcggtgggcgatgacgaagaccgtacggcccttcatcaggttatccatgccggcctgcacgacctcctcggtacgggtatcgatggaggacgtggcctcgtcaaggatcagcgcgggcggatcggccaccgccgcgcgagcgatggagatcagctggcgctggccctgggacaggccggaaccgtcgccttccagcaccgtgttgtatccctcgggcagcatacggatgaagctgtccgcattgaccagacgcgcggcctcgatgcattcctcatcggtggcgttcaggcggccgtaacggatgttgtccatcacggtgccggtgaacaggttcacgtcctgcagcacgatgcccaaagacctgcgcaggtcaggcttcttgatgccggccacggagatgccgtcgtacaggatctggccgtgctggatgtcgtagaaccggttgatgaggttggtcacggtggtcttgccggcaccggtggcgccgacgagcgcgatcttctggccgggcttggcgaaccaggtgatgtcgtgcagcaccggcttgtccgggttgtagccgaaggtcacgttggtgaagcgcacgtcgccgcgcagcagggtcagtcggccgtcgggcgaggtgatcgcctgctccttggccttcatcgccacctcgcgggccgagcccttgagcttttctgcggccttcagagacctcgtaccgtcgtcgccgacctcgcgcttccatgcccagtgaccggtctcgtggtcgacttcggtcatggtgcggccatcctcgccaagttccacgttcacgagcgtcacggtgcccttgtcttcctcgatgggttcgtccatcagcttgaagatacgggaggcaccggcgagcgccatcatcaccatggtcagctgctgggagacctggccgatcgggttgatgaacgagcgggatagggtcagcagggagacgagcgtgccgagggtgagcggcttgacgccggtcagaccgatgtcgttgacgccggccagcgagacggcggcgccgacgatggcaagcaggatgtagagcaggtagcccatgttgccgacgaccggcatggtgacgttgccccaggtgttcgcttcggcggacgcctcgaagagttcctcgttcttctcgtcgaaggtcttctgggtggcgtcttcatggttgaagaccttgatgaccttctggccgttgacggattcctccacgaaggcgttcacgtcgccgatccactgctgctgcttgacaaagtagcggccggagcggctcacgatcttgcgcacgatgaagtagagcagaacggtgaacacgattacgaacgcggtgaatggaatggacagccacagcatggacagcagcgccgcgaccgcggagataatcgaggagaacatctgcgggaacgactgcgagatggcctggcgcagcgtatcggtgtcgttggtgtagtggctcatgatgtcgccgtgctcgtggctgtcgaagtagcggatcggcagcttctgctggtgggcgaacatgtcgtcacgaatcttcttgagcgtgccctgctcgacggtgacgatcagccactgccacagccaggacgccacgatgccggccacatacaggcccgccatcaggctgatggcccgcagcagcggggcccagtcggagttcgactcccccaccatcggcaggatgtacgtgtcgatgagcgactggaggaacagcgcggaaccggcctgcgcggcggcaccgaccaagatgcacaccacgatggcgatgacacgccacttgtactggaagatgtagctgaagatgcgcttgatggtgccaggctcggctttgcccatggcgggcttgcggttcttgaaactctggtcgctgctcatcgtgcttctccttccttggtatcggctgcattggcatcagctgcgctggtatcggccgtgggcatggtcactgtcaccgtcacggtttcggacggctcagcggtagatgactcagcagcctgttcggcagcggccagttcttcgggctgggcctggttcttggtctgggattcgtagatggaacggtattcatcgcaggtggcgagcagttcgtcgtgtgtgccggacgccatgatgcggccggaatccatcaccagaatcatgtcggattcctgcacggaggccacgcgctgggcgatgatgatcttcgtggtgtccggaatctcgttgtggaacgcggaacggatcagcttgtccgtcttggtatcgacggcgctggtcgaatcgtcgagaatcagaatcttcggcttcttcagcagcgcacgggcgatgcacaggcgctggcgctgtccgccggacacattggtaccgccctgctcgatgtacgtgtcgtacttatcggggaattcctgaacgaatccatcggcctgcgcgagctgcgcagcatggcgaatctcttcatcggtggcgttcgggttgccccacctgaggttttcggcaatagtgccggagaacagcacgttcttctgcaacaccatggctacctgatcgcgcagcgcctcgagatcgtagtcgcgtacatccacgccgccgaccttcagcgaaccggagctcacgtcgtacagtcgcggcacgagctgtaccagagacgactttgccgaaccagtaccgccgacaatgccgacggtcatgccggagcggatcttcaggttgatgtcgtcaagcacgggcttttcggaactgtcggagtagcggaaggtgacatggtcgaattcgatggagccgtcggccatgtcagtcaccggctgtgccgggttctgcaccgtgctttcctcctgcagcacctggcagatacgctcggcagaagcctgagaaataatcaccatgacgaagatcatggacagcatcatcatggccataaggatctgcatggcgtaggtgaccagtgcggtcaggtcgccggtggtcaggcccacggcggggttgttgccggaggcgacgatctgctgcgcgcccatccatgcgatgaggatcatcgaaccgtagatgcagatcatcatcagcgggctgttgaagctcatgatgcgctcagccttggtgaagtccttgaagatgcgctgggagatgcggccgaacttggagacctcgaaggattcgcggttataggacttgaccacgcggatgccctgcaggttctcgtcgaccacgttgttcaacgcatcgtaggtgtgaaacacgcgctcgaacaccggatgcacgagcacggccagaccgcacaggccgatggccagaatcgggatgcaggccaggaacaccatggaaatcgacggggagatacggaacgagaacagccaggatacgaccaccataatcggggcacgcacgcccagacgaatgatcatcatgtaggcgttctgcaggttcgtcacgtcggtggtcagtcgggtcacgatcgaaccggtggagaaccggtcaatattggtgaagctgaagccctgcaccttctcgaactggtccttgcgcaggttcttggcgaagcccgcgccggccacggccgcgtactttccggacaggaagccggcacccagcgaaaccatcgagcacaccagcagaatcacgccgaacttgacggtggccggcatgctgccaccggtgataccctcatcgatcagcgaagccatgatggtcgggatcaggatctccaggatgccttcgaccgtcacgaacaccggagccaggatgctggctttcttgtattcacgaatcgactggcccaacgtgcgcagtacatgtttgggcttgtccggttcgacggctttgcgcgcctgcgcgattgcctctgcggtatcgctcattcgttctcctccttcgtgttagcaacctctgctccgtcttgatcgggagccatcaccacaggtgactgagggagtgtttgatgttcaaattcgcgttgtgcgcgctcgatgttcgcacgcatgcgtgcgacgtagtcgcgcagagcggccttctcgccatcggagaagccgccgaccagcaaccgttcgacccgatcgccgttctccttgagatcggcgacgatcgcgtccgccttgtcggtcaggacgatgcgcttgcagcgcgcgtcatgctccaccgattcacgggcgatcaggcccttcttctccatcagggccagcacacgcgaggcggtggaccgggtgatgcagaatttctgttcgatggtgtgctggtatatctcacggccgcggttacgcgccaagaacatgatgatatgcgcgttgccgccggtggtttccctggcggtttgcggcatgctctcgcccaaatagcggtcgacggctttggttaccgcgcgcatttcgatgctgagaatatgctgatccattgtcctccgtaccatgcgggggccgtgtgcgtttgtaccttcaccccacattgttgtatacgcaacaattcatgataaagagacccatatacaacagttgcacatacaacaatcggtgtgttgcctagacaacgaatcccacatatgccctatacacaaactggctcccttctctgaatctcagaaaagggagctggcagtttgcgtagtattacttgctcagcttggcgtactcgtcaaccatgaactgggcgatcttcttgccgccttcgcccagcagggtgggcagcgagttgatgggcatggagttgaggaacatgcgcatcatcgcattatccggaagcttcggcagctcgccggcctcgccggcggcggccacggcggccacgatcttggcgccgaacggatcggcctcccactcgccgtaggtggaccattcggtgagcggctgggtcttgccgtcgccttcgagggccacggcaacggtgtcggcaatgtcgcgggagctcacgcccacttcgatggcgtattcgccagactccacatgccagtcgttatacttttcggaccagtaggcgaacgcgcgctcatcaaggtcgatggtcacggtcttggactcaccggacttgaggaacaccttggtgaagcccttgagctcgtgcttcgggcgagccacgtcagccttgcccggcacaacgtacacctgcacggtttcggcagcgtccacatcggaggtgttggtcacagtggcattcacggtggcggtgttcgcgccggtcttggcaacggcgacaccggtgatctcgaacgtggcgtagctcaggccgtagccgaacgggtagtcgacagccttgccgtaggtgtcgtagtagcggtaaccgacgaacacgccctcgccgtagtcgacgtggccttcctcgcccggccagttcagcatgctcgggtcatcgttgatgtccagcggaatcgactgggcgagcttgccggacgggctgacctggccgaagatcacatcggcgagcgccgggccaccggactggccgagcaaccaggattcgaggatgcccttggcgttcttggcccacggggccacggtgatcacggaaccgttggacagtacgaccacgacgttctggttcgcggcggcgacctgttcgagtagggtgatctgcttggcgggcatgtcgagggtgtcgcggtcgaagccctcggattccgcggcttccggcaggcccaggaacatgaggacaacgtcggcgttcttggcggtttccacggcttcggattcgagggccgggtcggccggttccatatcgagcgtgaagccgggggcgaagtcggccttgatgccgcgctcggcgagcgtgtcgaggaagctggtcatcttggtgggggtgatgtgggaggatccgccgccctggtagcgcggggtgcgggcgaattcgccgataacggcgatcttctggggcgtggcggacggattggcgactggaccggcgttcagcggcagaatcgcatcatcgttcttgagcatcacaatggattcaatagcggcctgatgggcgacttcatcgtggacgtccacatcgaaacggtaattatcgatgctcattgcagcgcgggtcttgtttaccaagtcaatcatgccctgagccatacgatcgagctgggcgggggtgattcggccgtcgcggacggcgtagacaatttggtcgtcggtgtagctcggcggcatctccagattcaggcctgcattcagggaggccccacggtcatgatcggcgccccaatcggacatgacgatgccctcgaagccccattcgtcgcgcagcacgttggtcagcagccagtggttctgtgcggaatgcacgccgttgatgcggttgtaggagcacatgatggtccacggctgagctttcttgacgatgtactcgaaggccgggaagtaaatttcgcgcaaggcacgctggctgatgcgcgcatcgacgcgcagacggtcggtttcctgattgttggcggcgaagtgcttgagcgacgtgcccacgcccttggactgcacaccttccacgatgccgactgcttcatgaccagccaagtacgggtcttcggaccagtattcgaagcagcggccaccgagcgggttgcgcttgatattgacgccggggccaagaatcacggccaccttctcctgaatgcactcctcagccatcgcctcgccgaccttgtggatgaggtccgggttccaggagctggacagaccggcagctggcgggaaacaagtggcgggcactgagtcgtcaaggtcggtctcgccggtgctggaggccagagatttgcgcaagccgtggggcccgtcggtgatcatgtacccggggatgcccttggcttccgcgccctgcaagtgccaggcgtcgccaccggaggtgagggatgccttctcttctagggtcagatccttgacggacgggtagatggcctcgctcatgttacctctttccttgagtttcttgagttgtgcggcttgcgctgctgtcttgaattgtgcggttgttcgatatgcgttggttccgattcggccgggctgcctggctgttgttcgaggttcctccacgaatctcgactgccgttttctctcgaccgaccggttggtaggtagattatcaaaatctccggcacaacacgccgaaatcatttggaaccactactaaccgaccgtaaggttgcctgtatgaacgccccctcccccaccgataccgatcgccgcacctcgattctcgacgccgccgtcgaatcgttcggcaagctcggctattacggcacgtcactgcaacgcatcgccaccgaagtggggcttaccaaggccggtgtgctgcattacgtgggcagcaaggagggactgctcgatctggcgctgaccgaggaatacgaccgggtcaccgggtcgatcaatgccgcgatggtcgcccaggagcgcccgctcattgcggacatgtggcgtcaggtggtggcggtgaacaacaagcggcccgcgctggtgcacatgttctccacgctgagcaccgaggcacttgacccggcccatcccgcgcacgattacttcgccgaccgcgagcgccgcacggtcaccatggcgctcaatatcaactgggccgtgccggaaggcgtcaatgtcgaacatgtgctgcaggccggattctcgatgatggacggccttcagctgcgttggctgcgctcccccggccaaaatctcaataccatgtgggccgactgcgaggacgtgctgatgcccctgcccctgtgggacgggtatcgctgagcactttggctgcagttgcggctgtgatcccgcataacgcttctcaccacgcagagtgggggtgttccacactgatagaacacccccactgttggttcggccgcacgaacggcgatcagatatagcgcttgcagtagtcggcgatatcgcaaatcacctgatgtgcctcgcccgcttcgggatcgccggcctggacgatgttgaacacatggcccagcacccgctcgcgacccttgggccatacgctcatcgcatggtccttatgccgggcgtgcagaatgcgtgccagttcgtaggtgttgtcggcgatgaaatcctccacgctggtgatcatgtagatcggcggcacatcgccgtccacgatgagcttgtccagatcgagataggggttgaccttgatgtggtcggcgggcgtctgcaggtagccctccatgtaatagctcagcgcattggcgtgcacgccgccctgcaaacggaacatgccggaggtcaccaccagggcgtgcacctcgatgccggactgccacaggcccaaggcgccggccagctgcgtcgaaccgttggccgcgcagaggtacagggccaaggcgccgccggccgaatcgccggtcacgcagacgcgctcggcgtccaggccgtattcggcgccatggtcgcgaatccaatcgagcacggccatcgcatcggccagctgggcggggaaactcaccgagggcaccagccggtagttggcgttcaccacggcgaacccttggcgggcgagcaacatatcacggcattcgttgttctccttgttgccgtaatacaggccgccgccgtggaagtccacgatgacgggcagagccgcgccttcctccgcatccgcgagagtgtagatgtccagcagatgcgcggcgtcgccatcatgcacataagcgatgtccttcaatcggctcacatcgtccggcagcaactgggaggcgagatgcgccgcgtccccggcggtcatggccttcacgttggcggcgaacaggtcgcgcgcttcctgactgatcattgtcgttcctttcaatcgttatcgaaaccgtatctcagccacgcaccggcagcacgatggcggacggcgtggcgccgcccatgtgaatggtctggtgggccacctgcgtgccggtctgttcgctccacagtccagcgtggttggtgtgtacggagtattgcgggaaatcggaagatgagatatcgcagcggatgcgcgacccggcgggcaccatccagcagatgccccacatgtcgatgctcacgcggcggatttcgcccggcttgtacggcgcggcgtccggcgtatccagcccgatcgtggtgatggaagttcggtagttgcgcgcggtgccgtccgggtccacgcacatgagcttggccgtgaaggcggtgtccggagcgctggatgagacgtacaggtccacactaatcgcgccttggatgtgcaggtcatggtccagcggctcggattcgaacgtgatgacgtcatcgcgccacccgggttccggctggatgcgtgcgccaatctcgtccatcgtggtgagcagggcctcgccgcctcgggtcatgaccgggttggccggatcatagtcgtattcggcggcgctcgcggcttgcggagcttcggccgtcagttcgccggacttgagatagagcctgacttcgtcggcgcctgcggacggcagcggccaggagtcggcgacatgccaggaatcgctgccgatctcgtagtactcgacctgccgcatgggggtctgcttccgcttcagggtcaggtcgaaccattcgagcgcggccggcacttcggcggcgtcgagatgcttcggttccagtccttccagcggattgaggaagtagtggttccagcagccgatgcgcagccaggagtgttccttgacctgctcgttcagcgcggcgtacccggttagggcgctgccgaggtggtggtcgaaccagccctcgtggatgaacatcggcaccttgaccttggaggggatggacttgagcagtccccagaatccctcatcccagtaggcgtcggcgtccttggggtggctgatccagtcacgataccagtcaaggcggccgccccacatgtcctcgtccacgctcatctgcggcaggtggagggcggatttcatgtaatcggcgtcgaccggatatccggcgttctgcatggcccaggcggtgagcacgtcgcagcggaaggagcccttttggtaggcggaggcgaaccggtcggtgccgtagtggttggcgcagatggaggccaccttcggcgtggtgatgtccgccacggtccagcaggtcagggacaggtacgaggtgccccacaggccgatcacgtcgatccagtcctgatgttcgcaccaggcgagcaggtcggcaccgtcgttgcgctcgttgacgttcggttcccacgtgccgccggaggtgtaggtgccgcggcaccattcgcacaccatcgcgtagccgcgccgattgagatgttcgccgtgcagcttccacagctcgacctgctgcgggtaggggcaacgcaccacgatggtcgggtacgggccgggagtggccgggcggaagatgtcgaccgtcagctcgacgccgtcgcggcaggtgaccttggttgtttcgggctcggccggctcgtattccggcttgaatcgggaggattcgtactggctggtgatgttgttgagatatcgggtcatgaagtcgtctgcgtcactcatgaatactccttatattccttatatatacgtttgtctggaatcggttttgcccggcctcacttggcctgcttcgtgatttccttgaacgggcgcatacggaatccgatgaccatgcaggccgcggcgaccacgtacagggccatattgccgaccagcgacggcacataggagccggtggcgtcgaacacggcgccatgcgcggtgacggcgatggcggaggcgaccgcgccaaacatggagacgatggacaggatctcgctgtaatcgcgctggccgaaggacttgcggatgacccacggcagggcgacgagcacgacgccttggccgagtccggccatgaagccggcggcgatggccggggtgggcgtggtggcgacggccatgagaccccagccggcgaggccgatcgcggagtagatgacgatggccagttccggcttgagatagtcgaggaggatgccgatggtggccttgccaatcgcggcgccgaacatgatgccggagacgaccagtgcgccctgttccagcgtcaggccatgggcgatttcatggctggagacgtgctggaccagcgcggccacaatctgcaggagcacggagacgagcaccagcagcacgaacgtcggggtgcggtaggccttcttggattcgatgccgggcagctcgccggcggcctgggcgtcatcggcgacggcagcggagacgatatggccgtaggcctgctcgcccttggcttcgtcggggcggaacttgaacaccagcagggagaacggcaggatgcagatgacgaggatcaatgcggttaggcggtaggaggtctgccatccgagattggtgatgaaccaggagacgacggggttgaagatggtgccgccgatgccggacaggccaagggcgatgcccatcaccatgccgagcttgctttcgaaccagttggcgagcagcacgctgggggccagggaaatcgggatgatgtagagaatgcccatcagcgcgaatgagatgtagaactgccagaccgcgttgaagaaggactgggcgaggaacagggcggcgacgcccgcgatgcacacgctgatcaggatacgtgaatcgagcatcttcatgaccttgcccgcgaacagcatggtcacggcgccggcgatagccatgatcgacgaggccaatgcgatctgcgtgcgcgagacgttcagtgtctcgccgaggacggtgaagtacaggccaggcgtgttgacgatcaggccgaatccgaccagggacaatacgcagcagccgatgaacaccagccaagggcggctggacgacttggtttgggtggacattcgaacctccatgttcgctgttgtttcctcctgcgtgcgccgggtcggttccatcattgaatctgaccggcgaaccaaaggtaagcaagtacttacttttgttattaggtaagttactacttactttctagcgtgtcaatgcgagacacgccgggatgacggctatcatggctcatatcgcagttgggccgccgggcgcggaccatccaaagccggacgaaaggagacatgccatgggaacgcgcggagaagaacgcctcaaggcgatcaccgatgccgccaccgaagtggtggccgagcgcggctattacggcatgaccatccaggaggtctccgatcgcgtcggcatcacgcaggccgggctgctcaaatacgtcaagaacaagaacgggctgctgatgctggtgctgcgtcgatacgaagattccagcgaagccggagactacattcagagcaaacttgcgcttacgcccgaacagcgggagctttctcctctgctgatgcccgagtattaccggaccatcgccgaggacaccatgaaacgcccgcaactcacacagctgtatctggtgctgcgcgccgaagccatcgaccccaatcacccggcgcacgagtactacgcccagcgtggcggacggctgcgcgcgcagatcggcagctatccgtggaagctgccgcccgaatataacaccccacagaagatcgggttgctgtcgatgtgcgtcggctcggccatggagggcttgcaatcccgctggcttggcgagccagacatcgacttcatgtccagctggtcccagtacgagaacatcctgttccctcgcccccactggaacggctaccgctgagccggcctttcattcgggctatagccccatcgtttcgactgcggccacgatatgtgtgacggtacccgttttccgcacttcatcgaaagatttctttaccaacgattgcggataataccgcccatcacgcatacgcccgagaccgatgcaccagacctcattgcctgcgtacagtacgatcctgctattgcccgacactacgacatgtgtcacctttgacatatccatggcatcggtcaggacatctgccttcttcttcaaccattgcacatcaccatgaggactcactcgcttaggtgagattctgcgtcccctaagcaaatcctcatagagctttctaggaggaagacgacatcgcttggaatcatccagataataatccaagccacatagatgagcgaaatttcccgagtcccaaacaatggcaagagtcagatcatcttcacagtgaatttttattgaacggccttcaagtcgctcatgatacaggagagccgcagcatgggcttgcgccaatgcatactcctttgtcttcgttatattcacggctccccctttgccgaaaaataagggagggacatctgagccagatgtccctcctgagatgaaaagccatgttttacagtcttctgcatgactatcatccactactttcgaagtggaatcggtagtggcttcggttggcccaaccgtatcacccagccactgggctaggcaccctgctttcgcggtattcgtccgcgcggacgaatcaagtgccagcggcagctgacttctcatctcgaacccgcaacccaccccgccgcaaaggataggccgggtcacgaagctcattctctaccttacacaattggctcgaatcatgccaccagagagcaatttcgttctctttcattacaccatccaaccagcgtgccagacgtgagtgaaatcccaagggtcgaggcatgacgtgtcggattgtgggtcgatggtaggcaagaaatcatgattaccacgtaattggtagctccaataaatctgcccggcggatgcgctccacgctttgcgctgcatggcggcaacctcgcggtaaatagagcctctgattgatgtactgtgcatagcgttttcctcggagcgaccgccatcgcccgaatgcttagcgatcatccggttcaccagattgttggccacgcaccactcccctacgatcaccggcgtatagcgcgcggcccggcggatgcggcgttcgttccagcgcacgaacaagcgataccagcccatcagccaccgatccggaatcatacggaatagcggaaaatgctcggccatgaccagatagatatgcgtatcgagcatgacgccccgcatgccctcccgcacaaaccagtcccgccaacggcccagtcggaagccgtcatggaacacaatgacttggttctcggccaaaatcgggcgcaaccggcgatacgactcacggtagaaacgcttgaggaacaccattggaatcggcccactcctccgtgcttcaaagctatcctttgcctgcctgctcgatgacgacgtagcatacgtcaaccaatcgatcggctcattcagcacctcgataccgaacagcgccgcgcgatcgcgataccggcgagccagacaggccagcacattcaacgcataggcgaccgctcgcgggctatgatgccagcgcaccacgccggtgaggccgccgttgtcgaatccattctgtgagccgggcaccgtgtgcaggtcgataagaatcttgagaccggtacgctcggcccagtcgaacgccctgtccaaatactcgatgcagcccggatgaccggacacatccccgaagataaaatacggcacaggaatacgcaccagattgcagccatgcgcggcaatgttccgaaaatcagcttcagtgatatacgtgtcgcgatgccgcgtcagcagagcctccaactcagcagactccgtagaccgatgcagccagatctcgtccgcttcgccgctggcggcaaaaatccccggcttcatccacttttccagtaccagccagttgccgaggttcaccccattgatttgttcgccaatgcccagcgtgcccagtgccattaatgtcacccgcgctaatcgttcaatgcttcgccgtaacgaacgaccaacccctgattcacacgctcaaattcggggatgtaatcaacgatgatggcatctacaagacgccgggcgcgttcctcatcgtagatatgagcagaatcattgcgatcgcgcagcatacgcagccacaacgattcgtccatgaaatcgtaatattggaaagcggttttgagcacatctcgcggagaaccggaagcggaaacagggtctccctcataagccagcagcgccttgaacagtttccaaccaagctcaaactgcaactcgaacttgtcaatgatgccgctctggatgaaatcattgctgagatcctgttcgggagccttgcgcagcgacttcagtgcggaaacgtaattctcatattttttcatacaatacctttccgctacgctcaatctccgccctcagcgatgaagaaatcggctcatccagattaatgacatcaactttaagcagtgaccacagattgtcctgaaggttctgctccaagcgattgaaatcggggcaaccggccacggcaagatcgatatcgcttttaggccggttcacaccctttgcgcgagaaccgaacagcacgaccttgcgagcgccggcatcagcggcgaacgtacgaatctgttcgtacacgttctcaataggaaccatgacgcctcccgccgtatgcagaaaatcccggaccacccgcgcttccatcatacggccgcggcccgctcaccgcacggagctcgaaccacccgaacgcggcgacgcagttgcgggaggcgggttggcgctgtagggtgtgcgggaagttcctgacgccttttttcaggaggtgaatcctcatgttcaccacgttttctctggccgttattctcgactgcaccgtacgcatcgtgcttggcacggcattgggcgcactgatagggctcgaacgccagttgcgcgcccgaagcgccggcatccgcaccaacgcgctggtggcattgggatccaccctgttcgtgctggtcagcgagatggccgtggcgggcggcagcagcggagacccgacacgcgtggccgcgcaggtggcctccggcatcggcttcctgggtgccggcgtgattctgaagcacggcgcgtccgtatccggcctcaatacggcggccaccttgtgggcctcggccgcggtcggcacgctcactggttcaggagacctggtgatcgccatcatcggcgcggtgatggtcgtgctggccaacccgctgttccgcgccatcggctcgttcatcgatcgccgccgcagtatcaacgattatgagacggtcggccatgaatacacgtttgaagtgcgctgtttgcagcaacatgaggtgaagattcgctccctggtattcgatgcggtgcatcgcccgggcttttccgtgcgttctatcgccgcgaccgacctgcctgacgacatcgtctccatcaccgccgtgctcgacaccaccaagcgcaacgatgcggacatcgagaaaagcatcgaggccgtaatccagacgcccgaagtgctcggcgtgcgctgggatgtggagcacatcaccacgtccgactgatatgacaatgctctccgcacagccaatatggtcacgcggagagcattatgctaaacggccaacgccgaaactacttcaccttgcgaatcagcatgataaccactgcacccacaagcacgcagacgatggcgatcgggaagatggtcgcatagctgctggtggccacaacgccgccgacgataaccggggcaagcacttgaccaaccgtattggcaaggttcagaatgccgagatccttaccggcctcctcctggctgggcagcacgtccacgttcagcgcctggtctacggcaatatagatgccgtagccggtgccggccacacccgcgtacagcatcatgccaagagccgtaggcatcataatgggaatcgcgataccgatggcgataatcaccgaaccgaccgcgacgataatcttgcgccgatgcaaccggtcggaaatgggaccggagatcatggacgtgacgatgagcacaatcatcgaaatcacggacatagtggagatgaccgtaccggattcgtctacggacaggccaacatacttttgcagaatgtacagctggtaagtggcgaccatagaccagccgaccataagcagcagtcggcctacaagcgccagatagaagtcgcggcaattgcgggttggcaggatgaacgagcgcagaatatcgctgatgctcagtgttttggctgccacctcatcgttcttggacgaccgttcgcgcggccagaccagaaccgcaatgatgccagtaatggcaaagagcaccgcaccggtcaggaagcctgcgcccatatgtttgatgaattgtgcgcccataaatgtacctgccgattggccaacaatctgcgcgccaccgtagaacgcggagaaagtgcctcgcgtactttcggggatacggtcagaaagtacggcgactgccggggcaatcatcatattgacgccgacctgcacaatggaccagcccgctacgatgccggcgagcgcggcgctattggcggcgagcagataaccggctgcggtgataaagccaccgcacacgatccatggggtgcgtttgccgaaacgggagcgcgtgatgtcgctcatcgcaccaaacacaatgttggcgatgagtgcgaatacacaaccaaccgaattcatggtgccgagaatcacctcgggcacaccgatacccagttcggtgaagcgttgcggcaggagtacctgagagccggaagtgccggctgtcatccaaatcaaggagaacagcgcaaagccaataccgaagcgccatttttcctgtgtggtcagcgggcggcctgtgtcgggagccagtgtggatgctgcggcagtctcttcattgagtgccatgattattcctttcatacaaaggattcgggagctccctgctcagtattccgggagggagctcggccagcgaatcagatatggaactggagatgatgggtgccggcggtaaggttctggacttcgtggtctgggatgtccacaacggcagtggtgccgaccggcacagtgaccgtcacatcaacggtgctgccgtccgtacccatttgccaggtgactgccgcacggccgaacggggtgatatgcgaggtggaggcctcggtgagtccaccgcccacaatcggggcgacacggaacttcttccaaccaggttcgatggtttccaagccaccgatatgcgcgtgcatccattcggctaccgaaccgagcgcgtaatggttgaatgaggtcatgcctcccgggttcaaggagcggtcaggacgcatggaatcccagcgctcccatgtggtggtggcacccatggtgacttggtacagccagctggggcattcggtggaggtcagcaactggtatgcctcatcatcatggccggtttgggtcagcgcgggtagtacgaatggagtgccggcgaaaccggtgctcaccttgccgccggattcgcgcaccaagcaggccagacagttgccggccttgaccttgcgcacgggttcgccatcgagcaggccgaaggcgatggcgagcgcgtaggcgcactgggtgtcggaggtcatagtgccgtcgagtcgaatgaaacggtcgaggaagccggcaatcacatgatctcgtagcgcggcgtatcgcgcggcatcatcggcgtatcccagaatttcggcgatgcgcgtaatttgtatgcagctgcgggcgtagaacgcggtggccacaagttccttggcggtcatcgcttgcgtggggtcttccggtggcgcggtcgggtcgagccaatcaccaagctgaccaagcgggaagtcgggtttgcgatcccagacaccgtctggtgaaaggtattgttcgacttcgtttacccagtcgcggctcaggtcataggagtcagcgagcacttgtggatcgccgctttccatgtagagcgtccatggcacttccacggcggagtcgccccatgtggagatggattgagggtgtgcccacacgccgagcggaatgaatggcacgtagaacggcacggtgccccatttgacttggtcggcgcgcacatctttgagccagcttttgaggaagccatgtacgtcgtacaggtaggtggcggtcggcgcgaacaggcagatgtcgccggtccagcccatacgttcgtcgcgctgcgggcagtcggtggggatggagacgaagttggagcgcattgaccatacggcattggcgtgcaaacggttgagcagcgagttggagcaggtgagttcgccggtgcggtccattaccgaatggtatacgcggcagtccatgtcctcggcggtgagttcgcctgcgtagccttcgatctgcgcatagcggaaaccgtgcatggcgaatcgtggctcccaccaagcatcggtgccgttggaggtgtagatatcgcactgttggccacggcgtagggtgcgggtggcgatggtgccgtccggttcgagcacctccacgtggcgcaatgtgacgctttgacctgcttcgaggccgcgcatattcagacggatacgctgtgagcagttctgctcaaagtcgaccaaccagatgccacgaccatcgtcagtggaaccgatgcgttcgatggaggcaggctggtttctttcgtgtgcgcgtaccggcgaggtgtcagggttttcgatgcgggcggggtcgtagaagacttcggccacaggcttccagtcactatcatcgaatccaggcttggaccagccgggcatttcaaagcgagcatcgtaacgttcgccttcgcacaggtcagagcagacgatgggaccaagtgtggtcttccatcggcggtcccacgagttggaataaacggcgtcggtgctgccgtccgcatattcgacttcaagctgggcgaatacgccgatacggtcaccatagtaattcgcatagccaccgtcgaagccgagtctacctcgataccagccgtcaccgagccagaaacccatggcatttgtgcctgcagagaggttttcggtcacgtcgtaggtccacatttcgacacgctgctcataattggtccagccgggaatcaatgcgtcattgccgactttagcaccattgatttccgcttcgaccaagccgagcgcggtcagatagagccgcgcacgcacgggctggtctttgagttcgatttcggttcgcacgagcggcaaatgacgatggtcgctttctggctcagcccaggaggggcctacgaagtcggcaacgtggtcgaattcttcaaaaaggccggcttcaaaatgcaaggtgcggctgactgcgcccagcggcttgtgactggcggagacagcctgcacggtggcaaacacttcttcgcgggagacgagcggctcgaactgccaaggcacaagcacgccgtcgtcggcgggcagataggttttttcttcgcgcggtttactgccaggcacgcggcgggtgagggtgagcagaatctgtgcatcttccggcactgtgtgcgaataggtccagttcatgcgcggtgcgcggactgcgatgccgagcgcatcacccggatagtgttcaacagtgaagctggtgatatcgaggtcgccggtcaaggtaccgggcacaatctgcggcacggttgtagcagtcattgatgactcctttgtcctgaggtggtatgggaatcggctcctcccgaagaggagccgttacgggatatcaggcgttggccttggcgaactggcgttcctcgtcggtaccgtacttcttctgggcacgaatcatcaccgtgccggcgatgccttcgaccacgacgatggccgcgaagcaccacatagtggcctgaatggtctcaggcagcaccagggccggggtgatcagtgcgaacaggccacagcacagacgagagaagccgttgataaagccctgcacggaggcacggatctcaatcgggaaggattcctgggtccacaccttgtacagtgcctcgccggcgagcggagagccgaggttcatgaaggcggtggcaccgacgatgacccatagattcgcgccgcccatggccatggcaatcatggcgatgacgctgatgatgatgccgacgaagaaagccttattacggtacttgccaccagcaatcgaggcgaagacgatgttgagcaccagggtgaccaagttcaggataatgcccaggcctgtagcgagcgactgggtggcgccggccttggagaacatgtaggtctgaaactggccccatgtattggccagcagattccagccgacatagaagatgacaatggcgaggaagtaggtgagaagcaccttcttatcggcaccgaacagcaccttcattaccgaggtcttgccggtgttgtacgaagtggccggacgagcggcatcgcgggcatcggcttcttcgtggaagcgacggaatgttggagagaacacgcgccaagcccaggcgatgacggcgaatacagcgagaatggcgaacacgacgcgaccgccggtggcaccgctcatcgtggagacaaggaaggcgcagatgaaggagatgaacacgccgacctgccagaacacctgtgtggtggagacgagtcgggctgcggtggcatcatccggcgcatcatgggaaacaaccgtcatggaaaccggcaaatcggcaccggatgcgaggcccgcgataatcaggccgacaagcagcgtggtgaaatttccggcaaagatgcagatgaccgcgccgatagcgtagaccagattaatccagttgaagaacagcacgcggccaatcttgtctgcgaggcggccgccgaacagggagccgaaggcaatggcgaaagtcaggatgccggaaagcagtccaacctgcgtggtgtcaagacccaagccgtcctgccacacggtgatggtggacgataggccgacgataattccggagccgagcatcgaaccgattcctgcggcgaaggcgagcggcatgtacttgccaagtccttcattctgctttgttgaagcgttcatatctctcccttactgctgaagcatgtgaagcaaattcttcacatgctggttgaaccgtattcaactatttcaagtaatttcaatttgcttcaggcatatgtaatacattgcccatagcgtgcttgcttacttgattttctgcgatttccccgcgaacctgccgccatcgccagctgatatcctcggtgatttcgtagcactatcatatcaatctattttgaatatttcaaatcaatttcaaagctttcattgaaattttaattgagtatctcggtcaccttggcgtacagtagtgaaaaaaagcaatattccaacagttatcggcgttaccgggcaaaggagtcatcatgccaacgaacagtaaggtcggcgtgtcggatatcgccaaacatgcaggcgtctccatcggcactgtgtctaactatctgaattaccctgagcgtgtctccgaaacgttgaaagccaaaatcggtgccgccattcaggagcttggttatgtgccgcgccgcgccgccccctcccccgcgcaaacaaccactggcacaccgattatcggctatgtgatgaccgacatcgagcattcgctgttctccttcatttttgaaggcgcgcaggaggtgtgcgaggaaaacggtatgcagattatcggtctcaacgcctcttcagacctcgaacggcagcatgaactgattcgcacgttgattggcatgaaggtagcaggcatcttgttgagcaccgtgcaggattccgccgaagatgtggcggccgcgcgggccgcaaatattcccatcattctgattgaccacaccaatccgtatggaggcactcccgtctgctccattttggagaacaatgtttccgtcggacgcattgccgccgaagaactgattcacacagagtgcaagcgcatcgcatttgcggcgcattcctttgactatgaggcgattcaggatcgtcagctcggggtggaaaaagccgtggcacaggcgggagatggcgtgacgttccagctcatcgattccggaggattgatggttgaggatggacggcaattgggcatggaactttccgaccgtgccgaacagatgcggcgcgaggattccgataattcctccgtaccggacataccgataccagatggcattgtggccggcaacgatacattggcgatggggctgttggcgagccttcatgaacgcggcgtcttgcgtgttcctgatgacatcagcgttatcggcactgaggatatgtggtttcaggcgatcagccccatgccgctaaccgtggtgcaggctcctggcatcgacatgggccgcaaagccatgacccaattgcttgactatgccgagaacccggtctctcatgtgcacggcaccacgttgattgagccaacattaatccgccgcgcttccacccgcgcctgattattagggtgtgtttacactagttgatgaagaactttagacctcaaccgaaaacatgaaaccgcatcctgatttagcgacgacttgtcactaaatcaggatgcggccaggcttgtccaccgattcgaccggatgcgactattttcggttgacggtgatggcaactccgttagcgagagtgcccccaaccgggcaatgggcttccacatactcaatcagacgatttacggcgtccggatcgccatccgcatccaagtcgattgttgagcggagccgctggtatccagggcgggctgagttggttccgaggaatccgcccaagtcgatatcgccttcgacgtgaatgtcgagtttcttgatcttgaccttgaactttggcgcgaacgcattgatggcgattgcctggcaggagcccaacgcatccaagaggagttccactgggttcggccccttgtcggttccgcccaatgattcaggctcgtcgacagtgatggtgtgatgcgtgctcgttgccgtcacgttcagtcctgcgacatgatggacatcagccttgaatgtagtgattgccatgatcctgttccccttctgtttagactggcagcctgcgaacccagtttaaaaaacggaggagaaggaacacgacgagtcagcaacagcatgtgcttatcgcgcattatcaacgtgaggtacgagacagggaatggatgactatccgcaaaagcgacaaacatcacaggaacaatgtcttacgagactcagcgcatgttctttactcgtgtgtcgcacacgtgtcgttccaggagtcgtagtctgcgtgtgagttagcagctgactcgttggcgtacagtcagttgtccgagcaggtaatcccgatactgtttgtccatttgatgccgtattcggtttgctggcgtatggaagtcctcgacggttttctcctcatggaatgagcccatcatcgtgtagtagctacgacctagggccgattctccagtcgaagttcatacccaggttaaaggtgccggcgttgaatttatcgtgataatacttgaacgacttctacgagtgggtgacgctcttcggggattaaagccagttgtggagtacgcaatcatttttctaagttccatatattctccttgcaagagagcagcccatggcaaaatcactgaaattctaacgtaatgggctcacttccagaggttctggatgcacccctatcctgatggactcggtcatgaagtcaatgacagtcctcgtcaaccacctcgcaatggcggaaatcgccccgaaacgtcgacgttatcaggaagcaaaaggctgtgcctaatttcaggcttgcaaatcaattccccgataggagaacggtatgaggttcagaacggctcaacggaaaaagatggtagcgattgccgcggctttggtggcttgtatgatgatggccggatgcggagcatcagccaatacggtcgacatatccagcatggaattcaatccacaaggcaaaaccatcaaacagattgctgcagcattggaatccggtgaaaccaccagccgacaacttgtctcctactatctcgaccgaatcaacaagtatgatgacaacggtccagaaatcaatgccatcacgcaaattaatccacatgtgatgcggcaggcgtatctcagtgaccgtgggcgcaaagaccatgcgcaacacagcattttttacggcatcccattcgtagtcaaagaaaacatcgacgttgaaggcatgaacaccactgccgggtcgaaagtcttggaaaccaacaaggcgcgcagcaatgcaaccgtcgtgcagaaactgattgaccaaggcgccatcgttctagctaagaccaatatgtccgaactggccgcctcctacggttggctgggatatagttcctatggaggccagactaagaatccgtacaatctgaaacgtgacccatctggttccagtagcggtaccgccgcagccgttgcggccggattcgcaccattcggtctcggtagcgatacatccggctcggtacgcggcccggcatccgtgaccggtactgtcggaatgcgtgtcacttacgggcagacaagccggtcaggggtaattccgctgtcggacagtttcgatgtgaccggagctatcaccaacactgtcgaggatcaggcattggtactcgacgcaattgtcggccctgacgagggtgatgtggcgacgttgcaggctacacaggacacccagtacgagaaatcgctagcccaagcctcattgaaaggagcgaggctcggtatcgtcaacgtgttcaacggcggcaacagcgaagtggacgagaccttcaaagccgcccaaaacgagttgaagaaggccggtgcgacactggtcaacataaacttggacaagtcctacaccggcttatggagcagcatcatgggaccggtcggtgacgccgaattcgtcaccgactatgaaacctacatgcgctacgacggacgaagcaaggccaagacagttcaacagctgatagacaagagcaaagccctggctgacacgaatactcctgtcaatcctgctcgaatcaaaggctacgagacgaacgtgaagagcgccggcaagtttaagagcgacgaagcccaatcgattatctacgagaagatgccggcactcaccaacactgtcgaacaaaccatgatcaagaacgacgtcgatgctctcgtctacccgaccatgagctgtgtcgccagcgtccgccatgacgccaaggacaacacctacaagtgcgacagcgacgacccatacgccgcctcctatctggctagcagcgcgcacctgccggaaatcagcgtccccgccggtcgtgacagtcagaacatgccaatcggactctccttcaccggcgcacaagacagcgagcgaatactactaggcctcgctgccgcctatgagaagataagtccgtacaagaacggcgacggtctggagctcgactgatttgaaagaacgaagtgggtttgcctcaccattggagcaagcccattttcgttattcacattaatgggaggaatcaatcagtttgacttcttcggcgtgctctccgtaggtgagtatcgttgtcgagcaaccattgtcggttacggcaatcgaattgccgatgcaggtccaaccagcccatgctccatcaacaactggaccgatattgctaactgagaatacatccaccccgaattttgatgagagatggtggaaaggcatcttccactcctctccatatgcttctcctaatcgttcaggaggtacagcccatgacgatggtgcgagaatcatcttggcgcccattttcgccatggcttcgccaatcatgatcgattccatgtggttgtcggcgcatatgtcgatgccgattcgaccatacttagtatcgaacacgttgaccgaggttccggaagtatacatgtcttcgacatcgggaacgaggttgattttcctatgcttgcctaacagttccccggtatttgagatgaataccgcagagttatatatatggtcgccttcacgttccgtgatcccggcgatgataccgatatcgaagtcgaccgccatatctcttattctctgatatgtactcccctctgggataggttccgcctgctcgggggccgaatcagctgcccatccgaggtcgcagcattctgggaacagggcgacatcggtgtccccgactagggacagcagctccctcatatgccacagattccggttgagctcgttgggttgcacacgcatttgcatcattgcgatggtggtcacagttaactcctcgttgatcctaaaaaaagagaagggtggcccgatgcagtcgaaacatcaagccacgccaactcctgaacgattccaagctgaaagagaaaggggatgggagcctagaacccttcagaaggcctatcagtgggtgctctcgtattcgctggcccaaccgtcaacgtatgcggtcttcaccgtatcccattttccggtgccctgcacgtattcgagcattgcactgccgacgccgtctttccactgttgggagggcatgaacattatgccgtcccaagacacatcctgcttaccggcgtcagccatctcctgatcggcttggacaatcgggttcgacgacttcatgtcactgaacgacttgaatggcgtgacgaagcccatgtcatcggtcatggccttcttacccttgtcactggtgatgacccatttgaggaagtccttggtggcttgctggtcggcttcggacaccttgttgttgatggcccagtagttgtcgccagaaccggtcgccagacccttttcctcttcgccgggcagacccatgtagattgggatggcgccaaccatgtcggctttgacgccttccttctgcaggtcactccacgcccaggttccattctggtagaaaacaccctcaccgagagcgaattcggaggtcgcatcattaccggtcttagcgctcagttcagtcggagagacggtggaatccttcaaatacaggtcgaacgtctgcttgagctccggaagataagtgcccttgatggtcgcaggctgttcagtcacaccgtccagctcgtacgccaatgggatgccggccaactgttccttgaaacgccagtcggaactggagtcgaatccggctgaggtgaacgcgcctttgatgccaagatcatccttatgctcttgaatctcatcagcgacggtcttcaacgctttgaacccgaccaaatcgtcgatgctcttgatggtcgaccagtccgcctggaaatacttattgagcagatccttgttgtagatcaacccgtaggattcgatgacgaacgggacgccaaggatttcaccgttatcgcctttcagtgcagtgctctggtctcgcagctgcttatagggttcgctgtctgacatgtcggctgtgtacttcttccagcgggccaagcccacattgccggacacctggaacaatgtcggtgcattgtctttcgcgatttcggatttcaacgtctgctcatacgtgccggaggccgcggtctgcacggtggtttcgattccggtctccttcttatattcttcggccaacgccttccactggtcggaggcttccggcttcagattcaggtaatagacacgacccttgtcgctgtcaccacccgtatcggagccgcaggcggatacgccggcaatcatcatcaatgcagccgttgctgtggcgattatcttgattgtcttgttcatcattgaaccttccttttgttttccttttcattgagacaaaaagctcttacatgacctcatacgtgaaggtcttcaatcggtcgagcacgtattcgctttcctccagccacggcaaaccgaccgggaatatgtgtcccagtgcttcgccttttgctggccggatatcatgtagctcaaaatcgacatggttacgcgccaatgcgtcagccagtgcaagtgactcatattggataaagtcatcgctactggttgtcaggaacaatggcggcagcttaccggtcagattcctgagcgaatagattttcgaacactcggctgcatcgatgaaccggccgaacaacggtttggcgagaatgcgaagcaaatccggctcattaccgtcaatgattggagtatcatccacatactcactaagattgaatttgccggacaccaaggcaccaaacctaagatttgtctgcttgaatcccagtttttcctgatccagcaattctgggtcggattggattgcaagcgtatacagggatagacagcctccggcggaatccccggtgatacccatacgattcgggtcaatcgggtactcatccgcatgattctgcaaccagccgatggccgcgttcacgtcctgcaattgtccgaggaaatcggcttgtgggtaaacgcgatagctgatggagataaccgcgaatccgcgtcgggccaatgcgatgcagaagttgcggttgagttccttgtagccgtagacaaatccgcctccgtgcacgtcgatgtagacaggcaaattgtgaacggcgagcattattgcgtcatgtggaatgtagatgtcgagttggtgggctcgggtcccatcgtcgatgtacgggatgttggtgaatttgtcgatatcatcgtctgccccgtaatagggcatgcggttgcggtcagttgtgctgcagtcgacgcgcatttgcaggatgaggtcgtgaatgttcttgggaagaccttccaagtcttcctcgaccggcgtccatgcctggtattcctgccgattttcggcggagatttcgacactcattgtcgtcctccctgttgcgtttgcttcgttgttttcgctttggattgctgccagcttatatccagcggagtttctttgcaaacgaaagcaatgttctggcgtgtcacgttttcgttgtgatttaaggttttttctcagtttcgttgctgttctatcgatttattcatgtcttattttgcaatcgtttgttttctgataccgacgactctttccaaaatgaatattctaaaatcgttttagagaactagggtgtgtttatgctatttaagttttgcgtgataattgtcgtatgcgtacgccggggtatggcatcacacctgaccggttcgtgagggtcgcgcatctgttgccgcgccagtgcggcaacgtggcggtcgacaaccacacgttcgtcaacgccctgctgtggatgtgccgcacgggagccccgtggagggacctgccggagtgctacggcaagtgggtcaccgtctaccagcggttcgaccgctggtccgggaacggcgcgacagggtgcctgtccacggcattgcaggaggagcggatcatcggggtggagatccgggtgcccgccatggactccacgggcgggaaggtccaccagcacgcggccggggcaccgaaaaagggggctcccggtccgtcggcgtctcccggggagggcggaacaccaaagtccgcgtggtatccgacagcgagagcacgctcgtcaggatccatctgagcccgggcgacgagcacgacgcggcccacgggcgccgcccatgggccgcgcgtacgagggggatccgacccggctgccggccgagtcgttcggcctgacgccggttgtgcctcccaagaggaaccgtacggccccatgggattacgacagggaggcgtacaaggggcggaacatggtcgaacgcgtcttcaaccgcatgaagcaccaccgcaaggccgccacccgctacgacaggctcgacgagaccttcctcgccaacctccagctcatccccatcgccgtctacctgaaaaaacacagccaaaaacccaaccagtgtaaacacaccccagtaaaacgcctccctgcgcaacaacaaagggaggcgttttggtgacgcgtggagtaggggcggcactcacgtgcctgtgtaccgctacgccacggtgaaagtggtgcgcttcaggtcttcacggcgcgaggagtggccgatgagcagttcgaattcgccgggctcgacgatgcggttggcgtccgggtccacgatcgcgcagttcgccaccgggatctcgaaggcgacggtcttggtctcgccgggctccagtgcgacgcgctggaacgccttcaattcgcggtcggtccagctgtaggaggtcacgatgtcgccgatgtaggcctgcacgatctccacgccggcgcgctcgccggtattggtgagggtgatttcagcgtgtacggtgtcggtttcggcaaaggtgccgtcggcattgcttgcgccgcccacgatggtcggttcgccgtatgcgaacgtcgtgtagctcaggccttcgccgaacgcgaacgccggatcctgggtgaggtcggcgtaccggtcgccgtgctggccgcggatctggttgtagtagaccggcagctggcccgcgtggcgcgggaaggtgatcggcagtcggcccgacgggttggtcagacccaggatgatttcggcgatggcctggccgccgcgcatgcccgggttcggcgcccacaggatggagccggtgccggtttcagggtcgctgacgcgcttggcgaacacgccatactcccccacgatggaggcgggcagcacctgcggcttggagctgatgagcacggtgaccatcggcttgccggtttcgcgcgagacggcggcgagcgcgtcgagcagggcgttctggccgccgagcagttcgagcgtggcggtggagcaggtttcgccgaccagctggaccacgtcgccgaccacggccacgatcagatcggactggcgggcgttggccacggcctcgtcgatcagggcctggtccacggcggcggagacgccgatcttcgggcggggctggccgtccgggtagaactcgcctgcggggtcgggcacgaggtcgatgacgttcgcgccgcgcgagtagaccacttcgcaatcgtcggcggtgagctgggtcaggccgtcgagcacggtggtaatcatgtctcgaggctggccatccggcatccaggaaacctgaccggagttgccggtccagtcgccgagctggttctgggcgtcgtcggcgagcggacctaccacggcgatgcgcttgaccttgtttgcggcaaacggcaaagcaccgtcgttgcgcagcagtgcgatggattcgcggacgagttccaggttgatttgctggtgttcggccgaaccgatgaccgccttgatacgttcggcgtccggcagacgcgggtcttcgaacaagccgaggcggaatttcagggccaggatgcgcgaaacggcgtcgtcgatcagcgattcgtctagaaggccggtcttcacggcctcaatggcaccctcgtagaactgtggggtggtcatgaccaggtcgttgccggccttgaccgcgtctgccgcggcgtgcacgtaatcgggtttgacgtgctgctcccataccgaacggccgatgttgtcccaatcggtgatcagcgtgccgttgtacttccatgcgccgcgcagcttgtcggtcagcaaccatttgttgaatgtgaccggcacgccttcaatggactcgtaacccagcatgaacgtaccgcaaccttctttggccacgcgctcgaacggcggcaggaaccaggattcgagcttgcggtgggagaggtccgcttcggaggcgtcgcggccgccttgggtttcggaatagccggcgaaatgtttggcgcaggccagaattgcgttcttcggcagggcctcgccggccttggcaccgccttgatagcccttgaccatggcggaggcgagttcgccgatcagcatcgggtcttcgccgaaggtctcgtccacacgcccccaacgggtatctcgggcgatgcacaacacaggagaaaacgtccaatgtacaccggtacaagagacctcctcggcggtagcacggccggcggccttgaccttgtccggatcccagctgacagccatgccgagctgggacgggaaaatagtggcgcccggccagaaggagtatccatggatgcagtcatctccgataatcaacgggatgcccagacgcgtcttctcattgacggtcttggcggcacgagataaatcctcggggctggtatgcagaatggatccgacatgcttattcacgatgagatcctcaagatcgccgccgcgggcgtcaagctgcatcatctggccgaccttctcttcaagtgtcatacgagagagcaagtcggcgattcgctcaccagcgggcaaatcaggattcttgtacggtaaggtttcagcagttgcggcaggcgtagtgttgtcggtcatacgaagtcgctttcctcagtgaaatcgaacagtttttttaattaccaattggtagtttatctattgacagcatacaacacgcttatgccgcgcgcatcacatacaccaaaacgaccgtatgtatgcgaccccttcgttcgcccgcatacttactgccgctatcaagcacaagcatcggttcaaggcacacagcgaatcagcgatacccgtcccatatcggcgaaggaaatatcgccggctccagatcggcccattcatcgcataagtcaatggccggcccccgtaaccacctcagttgcacaccatccatgatctccagagcatggcgcaacgtgggccggacctcctcaaacgaggtgaattcggaaggcaggttccagttgtatgtcgaatagtattgccatattgaatcccgacgattggcaaactcgtcatgtaacggatgcgcaggattgaacgattcgacctgcaatatcgagaacagctgaacaagcatggggcgcgtggaattgcaatgtaccaagaacctcagatatgcgggcaatctgaaatcatcgggccctgaaccaggcaggccggaggccatgaagtcttccacactgccaaacgtgttgtaattctcgtgatacaccgcggcaagcaggttatctttgctaggaaaatatcgcaaaactccctgcttggtaacaccgaccgcatcggccacatcctgcacagaagtaccgttgtagccacgctcggaaatcagtcgcacggcggcatcgagaatttcctgccggcgttcccccggcgacttgcgaacacgcttatgctgcaatgaattcccagctgtcatatccgccagtctatccgcattctccccactcccatgcgcaaccacatccaatatccttggccggatatgcaaaacggtgccaaaacaaaacattctgtcatgccttcgacaccgatatcacgcaatagttttttctgtatatgcttcttcgcttactcctggaacacgtcgggatgcttcagatcgccgggaatgtcggacaaaaggccttcgagccccaggaattccttccagaaatcgagcggctggccgtatggcgaagcctcgcgaccgtgggcctggatgttggccttggcttcgaacacctcttcctcgctgatgccctcgaagtagctttccagacgttcacggtgctcaggcacgtagaacagagaggacacaatctccgtcagacgttcggcacgctcgataggcaaggaatcccagtggcgaagctcgatgaagttcttcagacgtacgtcattgaagtgcgtggagatgatgtggttgatctcgtacgggttgagttcgcggtccgggtacacctcccccgcgttctcacggaaggccgggcgatgcagttccttgggacttgctccagaagccacagcttcaggggtatgggtcaggtcagcgaacatgagcggcgtggacagcacgtcgatggcgtaatcctcccacccatagcgcgggtcgaacaggcccggcagcacattcgtgcgctggaagtcgagataatcccacatgcgctggcgcagcaacggccatgggttcgtctcaccttcgaaatacggggtgttgcggaagaagtacgccagaatcggaccgatgacggtgcccagacgcaacttttcgatggagtcgcgctcatccacataatcaatgctgacctgagtggaggcggagcaacgcatcatgcaggggccaaactgacccacgcggccgaggtagtcggtcattgcatcgtagcgatctttggggttgaccggcacatccgcaaagctggatttgggctggtaaccatagttgaccaagcggaagtcgagatcgtcaagaatcgggtcgagctcgcgacggaacttggagtacagcgtatttaggtcgctcggcttcttcaaaatgccgattgaggtttccacctgtccaccgggctcgagagaaacggcgacgccggaacggctgagacccaccagatggccgttctcccagtattccttctcctcgtcgtagtacggagccaagcgtttgagcaatgcctcgatgccattcggctcgtagtagcttacggcagtgtcgtcgctgttgtgcacgggcaggtgctcgatctccacaccgaagccaccggtgccacgctgggagcgaccgttctcaaagaacttgagcaggctctcgacatgcttggggttcggcttggcgagtaggtgcgcgtaactgattcggggagtaaccatgctttgtatcgtattcgagccggccggcgcgcgtgcccgaaagcccgcaatacgctatacgaaaaaccgatagcaggctccggcccggtttctcgctctagagactcccctcagtcgctgcgcgacagctccccccatagaggggagcttaagtgtatgtgcgttcagtccgcggaggtgaagccctgcggctcgccggtctcggcgaacttggcgttgtgggccttcttggcagcggcaatcatcagcttgatacggttgagctgattggcctcggaggcacccggatcgtaatcgatggagacgatgttggcttccggatgcagacgacgaatcttgccgaacatgccacggccggtcacatggttgggtaggcaggcaaacggctgcgcacaaatcacattcgggcaaccctgttcgataagctccagaatctcagcagtcagcagccagccctcgccggcctgtacaccgatggaggtgacttcagcagccttcttgacaagctcgggcatcggctcgtcctgcttgaacttgccgtgcgaggtggccagtgcggccttgataggcgcgttgtacaggtcaagacccttgcgcatcaaggcgtagagcgtcttgttgccacccatgccgaggttcttctcgttccagtcggtgatgtaggggcgggtggtcatgaattccatgatgccgggcactacggcctcgcaatcctgggattcgatgacgtcgaccacatggttgttcgcgtccggctggtacttgacaagaatctcgccgaccacgccgacacgcaccttgcgtggaatatcacgcagcggcaatgcatcaaaggatttcacgatctccttggccagcacgttatacggcagatagcccttcttgatgctcggcgtcttggctgcggtcttggaatagccgtgatgctcgatggtctcacgcacgatggtgtcccacagctcgtacagcttgttggccgaacctttctccacctcatacgggcgtacgcggtagaggcacttcatgagcaagtcgcccagaatcagcgccttgatggcacggtgcagcaggggcggggtggccttgaagccggggttatcttcgaggccctgggtagagatggcgatgaccggaatctgcggatagccggcatcgaccaaagccttgcggatcaggccgaagtagttggtcgcacggcacatgccgccggtctgggtgatggcgagcgctacatggtcgggatcgtatttgccttccagaatcgcgtcgatgagctggccgacgaccatgatggccgggtagcaggcgtcattgttcacgtatttgaggccggtttccacatcgccacggctcgcgtgcttcaggatgtcgaacttgtacccaccggaacgaatcaccgcttcgaccaaggacatatgaatcgggctcatctgagggccaacaatcgtatagttcttcttcatgtccttgacgaacttctcacgatgcgcgtatcgggacatggtggcgttgttgtggccggacttcttggcattcttggcgttcgccacgccggtggtgccgtccgaagtgccattcttgtgggcgactgcggcctgtaggtcgcgttcggcggcacgcttggaggcctcacgcatcgacttggtgagattcgggttggcggccatggtgctgtcaagcagaatctggcggccgggggttggcgcggtggagccggtcttgcggaatccggtggacttggggccttgcacggccttcgtcgcggcggcctgggatgccttggccgcggcggcttcgcgggccttgttggcttcgcgttcctcgacggcggccttgagcgagcgcagtcgaatcttggcggcacccaggttggagacctcgtcaatcttcagcagcgtgtacacgtccgccttgtcggccaggatctcggccacctgatcggtggtgatggcgtcgagaccgcagccgaaggagttgagctgcacgagttcgaggcccggataggaggccacgaaatgcgcggccgcgtacagacgggagtgataggcccactggttggtgacgcgcaacggcatcttggtgactgtgcggtcgcctacgtggcggaatccggcggcgttcttggagcgcgggtcggcttcgccttccgaaaggaattcggtgaggttgagcttctcccccggctgcagttcgcagatggaatcctcggagagcaccaccatgcccagcgagcagatggtttcggggatgccgtggttgatttcggggtcgatgtggtaggggcggccggcgagcacgatgccgcggcagttgtgctccttcatgtaggcgagcgcggtcaggccctcctgctgcacgtcgtgcttgaagaccttgtcttcggcgtacgcggccttgactgcggtttcgacttcctcacgggtcacgttggcccaggcgaactcttcgagaatgcggtcgaccatgagctcgtggttggcgagattgaagtacgggtgcatgtagcgcacgccgtcctcgcgcagttcgggcatgttggcgccgacgacgagcggatagttggccacgacagggcagttgtagtggttgtccgtgttgggcacgaggttctcctcgtagctcacgcacgggtagaagatggtcttgacgcccttgtcgagcagccacttgatatggccgtgcaccagcttggccggatagcagatgttttcggaggcgatggattcgatgccggtcttgaacagctcgtgggagctgcggccggagatcatcaccttgaagcccagcgtggtgagcagcgtgaaccagaacgggtagttctcgtacatgttgagggcgcgcgggatgccgatttcgccacgggtggcggccttgtcggtaagcctgcggtaggcgaagcaacgcttgtacttgtagtcgtacaggttcgggcggtcggagcgcttcttcttggcgtcgccgccgcgttcgcagcggttgccggttacgaagcgcgagccgtcggagaacgtggtgatggtgagcttgcagtggttctggcacagcttgcacacgtcacgctcggtggtcatgctcatgttgtcgagcgcttcgccggtcaggatggagctggcggtgtgggccacgccgtccacgacaacgacatggacctcaggcttggccggctcggtcttcttgaaggctgcggccttgggcccggacttgggtgcgggctcagcctcggactgttcctcggacccatcggccttaaccaccacatccaagtggtcggcctcatcctgatagtgcatgcgggcggtgagggccgcgccgaacgcgcccatgaggccggcgatgttcggtcgggtgacttcgcgttcggtgagcagttcgaacgcgcgcagcacggcgtcgttgaggaacgtaccgccctggaccaccacagtgtcgccgagttcgccggaatcgcgcagcttgatgaccttgtacagggcgttgcgcaccacggagtagcacaggccggcagcgatgtcctcgatggaggcgccttccttctgcgcctgcttgaccgaggagttcatgaacacggtgcaacgcgaaccgaggtccaccggatgggtggaagccagagccttttgcgtgaattcctgaatcgtcaggcccatggacatggcgaaggtctgcaggaacgaaccacagccggacgagcaggcctcgttgacggcgattgaatcgataacgccatcggtgatggccaagtacttcatatcctggccgccgatgtcgatgacggcggtgacgccggggctgaccatttcggcgccacgatagtgggccatggtctccaccacgccctcgtccaagtgcaggccggtggtgatgaggccttcgccgtatccggtggcgcaggagcgtgcgatccacgcgccttcgggcagctcagactgaatcttcttgacgatgttgatggcggcggtcagcgggctgccttcgttgttggcgtagctggaccagacgatttcacggtcgtcgttgacgagcgtggccttgatggtggtggaaccggcgtcgatgcccaggaagtgcgggccatgcgcgccttcgagggtgccgatgtggatgtgttccttgtggtggcgcttgttgaagtcctcgcggtcggcctcggtggggaacagcggcggcatggtgggcgtgttggagggcaggttcttcagctcgtccaaacgcttcaggatttcgtcgcaggtgtaggcctcgaaatggtggccctgatcgtcggaatccgtgtcggcctgcaatgccgaaccgtaggccacatacaggtgggcgtcggtcggcacgatgaactcgtcgaccttgccctcaagcgcgcgctggaatgcggcgcgcagctcggacatgaagaacaacgggccgccgaggaagatgacggtgccgtgaatcgggcgtccggaagccaggccggcgatggtctgcgtggccactgcggtgaagatggaggcggccaaatcgggcttggcggcaccatcattgatgagcggctgcaaatcggttttggcgaacacaccacaacgcgaggcgattggatacaggttctcgtagctcttggccatctcgttgaggccggcggcgtcggtgtcgagcagcgtggacatctggtcaatgaacgcgccggtaccacctgcgcacgaaccgttcatgcgttgttcgggcgtgggtttcaggtaggtgattttggcgtcctcgccgccgagctcgatgatgacatcggcctgcgggtattccttgtcgattgcctcggtttcggcgatgacctcctgaatgaaaggcacatgcagattgtcagcaagcgccagaccgccggaaccggtgatagacaggcgaatcggttcgtcgccgcgtccgaggtccacaagcttcttgtggatgtcgaccaacaggccggccacggtggcacgcacgttggcgtggtggcgtcggtaatcggagaagagggtgtctcccagggaatcggactgatcaagcaccacggccttgacggtggtggaaccgatgtccaatcccacacgcaggggcttcgggtgtgaagcgggctttacgctcgcgtcagtggcgatgtcaaccatgtgttcctcttaattccgacttccgggagtgcacgctttgaggcatcatgaaccgtttcgggacggctggcagataccctgcggacggcttcgcccggctacttcttatggaatattagtccgaccacctgcccaacatggcacgaggcgaggcgatttcgctcacgggaaggccttttcccaacagttccaacgatattgctgagtgcggcattccagaactgctactacgaggcctgttggccttcgccggcttcgcggtctttcaaatagatttcggggatatctcgttcttgatcgtggagcttggcccagatgaccggttcgccggcttccagagacttgggcacatcgaggatgcgctggtttctggagccgcggaattgcagcagcgagtccttctggtctctgaggtagcggccgtcgacgagaatgtcgatgagatgtagcaattcaagcttgtctggggtttctccggggcgcatgagttcttcccatgtgtagccggtccacgaccagatatctttggtatgaccgaattcctggcggatacgttgtgcgagcggcaccagcacgggagtgttgaggaatggctcgccgccaaggaacgtaatgccttgcacccatggggctttcagatcttcgatgattttgtcttcaagtttttgcgtgtattcgtggccggcttggaaatcccagatggaggcgttgaagcagtcgacgcagtggaaggggcaaccggagacgtaaagggagttgcgcacgccttctccgtcggtgacaatgaaggttttgtagtcggcgatcatccgcttggacatgcgccggccatcccattgaccggctttcggatcgttggcaagaccgttggagggtacggaggggccacgcccggtctcgccggccgcaaagtcatggcgcttgggttcgggcttggtcgtatgcagctccggcatgattccctccttacggaaagcattagctcccgctggcgggagctgtccgtcatcagacggactgagggtggtcaacaccataaaggatgaccgccctcagtctcgcttacgctctacagctcccgtcagcgggagcaagtataaaccctacttggtctcttcgaaccactcgcgagtggttccgtcatccagcgtcacacgaccggtttcgccgctcatgtgcttgactcggtgggcaatttcctcgtgacggccgtgcaccatcgggcgctggaccgggctgccgagatagccgcaggtgcgcttggtgacgttgcacttgtccgggttggagttaccgcactccgggcacttgaagccttcctcggtcggctcgaagtcgccctggaagccgcacacgaagcagtggtcgatcggggtgttggtacccaggtagccgatgccgatgttgtaggcgtaatcccacacggcttcgagcgccttcgggttgtcctgcaggcacgggtactcgcagtagttgatgaagccgccggaagcgtagtacgggaagtccttctcgtagctgagcttctccatcggagtgggctgcaaccacaccgggtagtggaaggagttggtgtagaagtcgtgatcagtcacgccttcgatacggccgaacttttcacggtccatgcggttgaagcggtcggtcagggattcagccggagtggagtacacggaatagtggtaaccctccgctttgctccactgcttgcacagctcgttcatgcgcttgacgatggacagcgcgaactccttgccttccggatcccagccgtggtcgcgaatccagttcttgccatagaagaccgcagtggtctcggcaaggccgatgtagccgagcgacacggtggcacgctcgttcttgaacagctggtccacgttgtcgttggcaccaagacgaccaaacgcaccaaagcggaacagggtcggggcgttgaccggggtggcttccttgcagcgcatgatgcggaactggagggcctgatgggcgacttccatacgctcgtcgaacagcttccagaagcgagccttgtcaccgtgggattcgatggcgatacgcggcacgttgacggtgaccacgccgaggttcatacggccgtcttcttcatccttgccggtctccgggttgatccaaccctgcaggaaggagcggcaacccatcggagccttgaaggagcctgtgatcttgacgatgttctcgtagaacaccacatccgggtacatgcgcttggtggcggactcgagggcaagctgcttcagatcgtagttcgggtcacccgggtcggcgttcacgccgtgcttcacagtaaagacgagcttcgggaagatggcggtgtggtgttccttgccgaggccgcgaatacggttcagcaggattgcgcgctgcacttcacgagagaaccagtcggtgccgagaccaaagccgacagtcacgaacggggtctggccgttggacacacggttggagttgatctggtattccatggtctgcatggcatcatagatggccttgcgggtacgaatcttggcgaggatttcacgctcttgctcaagttcgtcaacgtcggtgtggaacggggtgtccatcggcagcggttcacgggaaccgaaatgcagcttggcgggctcgttcttcttggcgctctcgacctgacgacgggcgaattcaaccggcatgccgtcggggatggtctcacgagcttcctcaaggaacttctcgtaatccttcttggcatactgggcaagatgctcgtcggcacggttggcggtctggccaccatactggctggaggccacgtccttcatgatctgggtaatctgggtggccgcaatggcgatggacttcggggaagccatcggagcgttgccaagagtgaagccattggccaacatgtcccagaagttcggcaaggagcagttggactgggcagtgaacggcgaatagtcggcatcgtggaagtgaatgtcgcccttcatgtgggcgttggacaccgccggcggcagcatgttgaacgcggcggccttggacacggcaccggccagcagatcacgctgggtggagtagacgttggaatccttgttcgcgttctcgtgaatcagggtcgggtcatgattaatgaagcgagcaacggcctcgttgacatcagtggccttggcacgctgaatgtctttgtcgagacggtaattggtgtaggcgcgagccacatcgtacaggtgggcgtcaatgagggcgtgctccacgagattctggatgtcctcgattttggcggggccggtgtaacgccccttgatttcgccttcgacttggttggcgaaaccacggatcatggcatcttcttcggggccgacttccttgttcaggtcgccgaaagcagacttgaccgcagagatgatgttgatggggtcgaagtcgaccacacgaccatcacgcttctcaacgagcacggtggaggccttggcggccaccttggtctcgttatcggtgacggtttcctccagcacctgtgcgcccatcgggcacccctttcctataaggcgaacactctcctgagttccgcattttggccgcactcgacgtgggccacacgaaattacattgatatcgttttcttgaacctctagaagaatacggcatccccacccctatatctagtgctcaacagtggtgtgtcgaactatttatagggtttttcggctatttttcgccaaaactacaagtgtgtgattagcgtaactgttttctgctcgcgtgtcgcacagcgagctcactgacgactctcaatcgtcagtgcaacgcatatctcactcctcttcatagcacccgtttcttcgccataatgactcctttcttctgatgcaccagaccatctccatcatcggctgatacatcgcttcgtacggttcttgcattcatcatcacaccgttttcaggcgacggtaaatttttaccgtcatcaaccaacgcacttatagtggagtgcatgactactgcaatgggctactcatctaccggccgtccaccgaccgccgcttcactggcctcgtctggctttgagccgggtcaaggcactttcgcgcccgatcggggcgccatcaatctgccgaatgagcctcgccctatcgatcagctgcctgcacgcgccgctgaaaccaccgcgcaaaatccgtggccggtaagcgtgctgagccagaagttctacggtgccgtggaacgatggccgtccgcgtgggtcaccggccagatcacgcagatcaatacccgtcgcgccggctcggcctacatcacgctgcgcgacgacttcgaggatatcgccatggaagtcaatggcttcggcaggttcgcggccgcggccagccagttcgttcagggcgaccgcgtggtgattcacggcaaaccgaacctgtggatgaagcgcacttcgctgtcgttgcgcggggacacgattctcaaggtcggagccggtggcagcctcaaggccatgatcgacgaattgcgcaagcagcttaagggcgagggcctgttcgacgccgatcacaaactgcctctcccggagtttccgaagactattggcctgatttgcgcacctcaggcacgtgcggaaggcgatgtgatcaccaatgtgaaccttcgttggccttccgtaaccttcaaggtggtccatgtgcatgttcagggcgagcaatgcccggccgaggtggttcaggccattgcacaactcgatgccgacccgagcgtggatgtgatcatcgtggcccgtggcggcggctcgtttgaggatctcatcggtttctcggatgagcgtgtggttcgtgcggcgtatgcctgcactacaccattaatctcctccatcgggcatgaggatgactggacattgctggatctggtcgccgatctgcgcgcctccacccctaccgatgcggccaagcgcgtggtgccggatgtgcgtgagcagtcgcagctcatcgaaggtgccatcgaccgtatgcgactgcgggtccgttcgcgcgtggagaacgagattcgacttatcgagggatatgcgaaccgcccgagcctgacacagccgcacaccatgcttgagcctcatcagcgcttaattgacgactcgttgcaacggctcgatatcgggctgcgacgcatcgtggacgatgcccagctcaccgtcgagcgagctcacgcctcactgaccgcactcagcccgcaatccacgttgaaccgaggctatgcggtggtgcagtccgccgatggccacgtactagacgatgcttcgcaggtaagccctggggatggcatcaccgtcaccttgaagaagggtgtcattaccgcaaccaccacatccgcaaccgcgtgacacgccatacgcagccacgcatatataccgtatatataaggagaacatcatgaccgaaaacgccacatccaccgacaagaacacccccgccacgtccctgacggacaaggaacgcgagctcatcgcccagatgccatatgaggaggcgcgcgacaagctgattcaggctgtccaggcactggaaaccggcggcctcaatcttgaccagtcgatgcgtcaatgggagatcggcgaggccttggccaagcgcgcccagggtctgctcaacgacgtccgtgccaagctcgaccaagcacaagccgagcaagccgccaacgaagccaccgcaggcacgcagtccaacctcgactgagttgcctcccggcgcggcatcccgcggctcgcacccgagtccggactggactgagttctgcttcccggcatacgatagtggtgattaggccacattggtagcagttatagaagggaaatcccatgtcaacgctgattcttgtattccatccgcatcttaaggacggctcgcgcgtgaacgcccgcctgctcgccgaactcaccgcacaaggcgaggacgacatcatcgtgcgcgacgaatacgccgaatatccgaacttctccgtcaacgccgacaaggagcacgagcgactggaggccgccgaccgcgtaatcctccagttcccgttctactggtactcctcccccgcgctgctcaaggaatgggaagacgaggtcatcaccgcaggctgggcctacggtggaggccacgcactcaagggcaaggagctcaagctggtggtcaccactggttccgacgccgccaagtaccgcaaggatggcgagtacagccacaccatggaggagctgctgagcccgtttgaggtcgtggcgtacaagatcggcatgaactatgctgagccgttcctggtgcagggcaccgccaccatcggcgatgcggagctggatcaggccgccgccgattatgtttcggcgattttggactgaataagctgaggccgggtgcaagtcgcacccggccttgttgtttcgcgggctagccgcggtctctcccagtcagcctgcggctgacagttccctcgtcagagagagcttattttttggatcagagggagttgatagctacttcttcaacggcacgtagatcacgtcgtcaatgagctcgcgatagtgctcaacgatttgcgcgcgacgggtcttcaggctcggggtcagcatgccgttggcctcggtgaattcgtctggcagaatctcgaacttacgaatcgactcggcgcgggaaacgccctcgttggcggcgttcaccgcacgctctacctcggcgtgaacgatggcgttcttggccagcgaggccagatcgggttccggcttggcaccctgggattccagccatttgttggcatccgccagatccagcgtgaccagagcggccacgaacggcttcttatcaccaataaccaagcactggttgaccacgggcgaggtcatcacggaagcctcaagcagacccggcgacacgttcttgccaccagcggtgatgatgaggtctttcttacggccggtgatggagatgaagccgtcttcggagatatcgcccaaatcgccggtgtgcagccagccatcggtgatctgctgggtggtgacctcagggttgttgtggtagcccctgcacaccagcggtcccttgaccaccagctcgccgtcctcggcaatgccggcggtgataccgcacatcggcatgccgatggtgccgatgcggttgtcctctggcaagctcacacacaccgggccgcaggtttcggtcatgccatagccctcaagcaccggcatgccgatgccgttgaagaagtgggaaagctcagagtccatcggggcaccgccggtaatggcgaagtcggcgttcggaccgaaaatcgtgcgaatcttcttgtacaccacctgctcatagaaggcgtgggcgatacgtccggtaatcggcagctgctcacccttctgctcggccttggaccattcgcgcgcgttctcggcggcgcgcatgaacatcttgccagcgaatccggtgccggcgcgctgggaggcggcattgtagaccttctcgtacacacgcggcacggcaagcagcagcgtggggccgaaggtctcgaagtccttgaccatcgtcttcatattggagctcaaggccagcgaaatcgtgccgccaaaactgaagaattccaggaatcgggcgaacacatggctcaggggcaggaacagcagcagacggcggttgggccatgcgccggcacgaggcatgtactgcagcgcggaaagcaccaggaaggcgaagttgcggtgggtcagttccacgcccttcggggtgcctgtagagccggatgtgtagacgatggtggcgcggtcgtcgccgtgggaggcttccttgtattcccagaattcggcgtcggtgacgctttcgccgtaggtcttgatggcgttcagaccgccggcctcgattacgaacacgttgcgcagggtgggcacctcatcgcgcacggattcgatcttgtcacgctgcccgtcatcttcggcgatggcgagcgtgactttggaatcgttgaaaatccagctgacctggctggcggagttggtctcgtacaccggcacggtgagcgcgccgatggacatgatcgccatatccagcgcggtccactcccaacgcgtgcgagacacgatggccacggagtcgcccttgttgacgcccagaccaatcaggcctttggccagatcgatgaccatgtcacggaatacttgggcgctgtacgggtgccaagtgccatcatcgcccttgtattcgatcatggcaccttcgggatcgcgcttggcgcggttatcgagcagatcgaacaggttgatgtcgctgtcaatcggctccttgacgggattggtgaactgcttgacgatacgagtatcgtttatggccttatcagcgatgttttcagtcatactccccatgtaactccacggatgctacaaaacacgcgcgaaacaacggattgtccagaccaaatggccccggcaatccgttatttcgggcaaaccaggtaaatctgtcgcaccgtacattcagcagattactcggcggagttattggcctttttcagctcgtcgcgaatctcctgcagcgtggcgagagtctgctcttcaacgctaggcccctgttcttcagcgtcagcctcatcctgggcagcagtgagatcacgaagcttattaatcggcaaaatcacgcagaaatacaccgccacgccaacaagcaggaagttaatcagcgcgttaagaatcgcaccaaatgaaacagtcgagttgttgaacgtgatggtcagcagtccggaaagatccggtacgccgccaatcatgccgattaatggactgatgagattgtcgacgatggaattgaccacagcggtaacggcagagcccatcaccacacctaccgccatatcaatcatcgatccgcgcgacaggaatttcttaaagccattcaacggacctttatcggtcaaagcaacaactttgcgagcggttcctcccgtggccttggcaaagtcggtggcaatattcatgggattgtggttactcataacggcactccttacgaaattcagacacttcacttgtatccgactggttttcccacgaccccattatgccgcttgttggaatatccctataccactgcggcgttcccgtacatgactatgtacgagaacgccgccaaccctgcttgcagagaacctgttagagctgtttagaactggatgtaatcgacttccgtatgctcgccggtttccaagtatttcgccacatcatcaggaccgacgaacaccagttcgaccgcttgcgcaatcatcagattgacacgatccattggcgtaaggttttcgaaatagccgtacaccgggattcccagcgcatgcgcatatccgatttcgaacatcgtgcccgggtcctcgtccataagattggcgaccacggctttagcagcattaatgccatggatatcgtccgcaaagcatccttcagggcctacttcttcgatctggctgacaaaccgcggcttgaacagtaccttgccatggtcttccaatatcttttccaaacgttccatacttgccgtttgttcaggatcaaagaacggaccggccacatagaagtcatactgtttgtcttcactcatggtctctagtcatagcgcagcaacgtcgaacgtcagccgttattttcactgtatggacaaggggtcgtattgtgaacattgctacgggataaccgtcaacgactacgtacgttgcccacgattggcgcatgccgccgctcttgcgccgtccgcactgccagcccgtcagccgcgattgacgatttgcatggcgcggccatcgtccatcaggtggaagccatgcttctggtagaacggtgcgtttttgctttcctcaggcatgacttccagcaagaagtagtcgcgatacttagccttgaccagttcaacgagatggctgccgatatgctgcccgtgatatgccggatctaccagcacccaatgcatataggccaccatttcggtatcgtcgagcacgcgaaccaagccgaccaaatggccgccatcccatgcgctgatcaccgtatccgaatgctgcaatgccttgaacaaccgttccggccactgcgccgattcccaacctaccgacttgaacagcgcctcaacctgctcaacagtaaaccgcttctcttccgtgtattcgatagccatggaccctcacgacaaccgtgaagccccacatgtctttgcatagtttcacacgacgggatgatggatagtggaacctatacgtttacacatgcctaatgcccatggctcatcaccgatgaatagaggctgagataccgtcatgtttccgaagccaagtgcccgagatcggattcgaaccgacgacacccgctttaggagagcggtgctctatccactgagctactcgggcaacgacgtttcattgtacacggccacacgcccagtcgcatcatgttcgcgtggcagcttgcgcaagccatccggcaacctgagcaagccacatggaggaacccgacatcaggtcatggcccggtctttcgtgccagtttggtgcgaactgctcttgcgcacggcgaaaagacactgaaagacaagccgtacacggtacagtggcaaatcgcacgaaaagcaaagtaacagtaaacaagccggaggaaagggcagcatggcaaaggcacggagtactaccacaggcgcaagcgtacgagctcgcgccgctgccaagccacgctctgccagagccacggcacgcccagtatccaagtctgccgtgaagccacacaaacggcatcgtctgcttggttttctcgccacgatgttcgcgcttcttgcccttgccggcgctgccgcccgcgcgctgcctgccgatttacaggaactgccatttgcgccgattgtggtatcggcaacgccatggttcacgttgcttggcttgattgccctgctgttggccatcgtgtcgcggcgtatccttgccgcactaatcgccatcgccgcaatcgcatgcaatggctattggcaatatccgttcttctactcgaccgatccactcccccaagccgcgcagaacgccgtggccgcagcctcccccaacaccagcgatgcctacgcgcgcgtcatgaccttcaatgtgtataaggggcaggccgacccgcaagccatcgtcgagctggttcgcgatcaacgcgtcgaagtgcttgctttgcaggagaccaccgaggatttcgtcaaaaaactcaatgaggctggtattgagcattatctgccgtatgcgcaggtctcatcgtctgacggcgtattcggtaacggcctctggtcggccacgccacttgccgatccgaccgacgatgacgtgaattccagcgcctcattcatgcccggcggcacggtggatatgggtggccagcagattcgattcgtatccgtgcacaccaccgctcccgtacccggctactggcggcagtggaagcgatcgctggatgagttgggtctgatgcgcgagcatacggatacacggtatattttcatgggcgatttcaacgccacttacgatcacacgccattccgtgattttcttggcgaccggttcgtggatgccgcacgtgaatccggacatgggtttacgttctcatggcccacgaaccgtgcggctgtgccaatgttcgccggtattgaccacgtggtgcttgatcagggcatgaaggccggacaatgcaaggtggtcaaagtcgagggctctgatcatgcggcattgttggctaccgtggcggttgggtgattcccctcaataggactagaaaccgaggcgggtgcggccgaattggtcgagccagcgcaaaatcgcgccttcacgcagcgcccacgggcagatctcgacttcctgaatattcagggccttcatgatctcgtcggccaccacgccgccgcccacaatctgcatcgtgcgttcaggcgtgatgccgggcaaagccacgcgctgctcaggcgcgatcgccgccaaacgaggaatccagtcttccaactgctcacgagtcataatccatgaatcttcgcggcccggcgcacgcatcaccgcaccgcacaggcgagccagcgagcggaaggtcttggaggtgccaactgcatgattcgggtgcttggattgcgggaaaaccttgaccatcggctccagaatcttgcgcacgttcttacgcacgtcttccaactcgtcgggcgtggccatgccggaaggcagaaattcagtggtgacgcggcccgcgccagccggggcggaaagcgctacggtcggctcttcgtcggagcccatcgccacttcgagcgaaccgccgccgatgtccagcaccagcagtcggccggcatcccaaccataccaacggcgggcggccaggaaggtcaggcgagcctcatccgtgccagacagcacagtgacgccctgaccaatcagttcctcgatcttgtgaatcactttgttgccgttcggcgcctcgcgcagggcggaggtggccataaccagcagctgggtgatttcgtattcctcggccagccgcatgcactgggacacggcttccagaatcgcctcgatgccggacttcttgattgagccgtcgtcctttaaatacttcatcaggcgcactgtggatttggtgctggcctcggggtcagggcgagcgccgggggcggcgtcgacgataagcatgtggatagtgttcgaaccgatatcaagcacaccaagtcgcgtggtatgcgaacgcagattgaccatgattcctattcctgaccttacctaacccgtgatggccgaacaacgggccgaccatcgcaatcagccagccgtgcgccaccatggcgagtcgttcggccggcaaccaacaccgtgaggccagccgaacatcacacaaactcgactactgtacaacaatcacaccggctgccgcgccgttcacagcgattcgacgaacgttccgagacgttccagcccctcggtcagggcctcacgtgaggcggcatagctcaggcgcacatgcgtatccgccgtggccgcgccgaagtcgcggccaggagtcagagccacatgggcttcatccagcgcgcgttcgcagaacgtccaggcatccagaccagtgcgggagatgtcgaagtaggcgtagaacgcgccattcggctccacctcaaccggcaaaccgatgcgcttgagcccgtcaatcacaatgcggcgacgggccagcaattcctgacgacgagcttcgcattccgccaagctttccggcgtgaagcaggcgagcgccgcatgttgcgtgggcgtgtgggcgcacaggtagtagttggtggccagatcgtcaaccgcttccagcacagtgggctcgtccggcagaatcgcccagccgaggcgccagccggtcatgccgaagaacttggagaagctgttgcatacgatggcatcggggtcgcaggccagcacggatttgacttcggtaccgtccggctcccggtcagccaagtcgaggtaggtttcgtccacgatgcgccatgcgccgcggctggcggccaacttgcacacctcgtccaatacgttgaagtcgatggtggtgccggtggggttggacggcgacgtgatcattacggccttggtcttgctcgtccagtactggctgcacaggtcggcggtcaggtggaagcgggtggcggccgaggtcggcacatcgatgacccggccttcaaacgaccgcacaagttcgcggttgcatgggtaggaggggtcggccacaatcacatcgtcaccggggtccacggtcagcgcggtggccaacagcagagcggccgaaccgccggcggtcacgcagatacgcttggggtcgatgtcaaggtcatgacgctcgcggtagaagtcggcgatggcctgacgcagttcaggtaggcccatggcggcggtgtacggcagggcccggccgtcgtactgttcgcgcatggcgtcgcgtacggcgggcggcgcgccgaaatcgggctcgccaaggcttaatttgatgacgctggtaccttgggcgatcatcttgtctgcttgttcgccgaataccatggcacggaagggattggcctcacgcgctcggcgggacatgactggagacgcggccggagattggggctgctgcgctgcttcgttttccatatttcggttctatccgcctcacgggacaaggtttcttcttctataatcactgtaggtcgattgagtgcaccaacccgcattcaaggaggaataatgagtcgattcaatggcaagcgcgccgagttcgaggccagcggcgaaaaaatcaacgtcgcgattctgggtgcgggccgcatagctcacaccatggccggcaccctgacccagatggctgaagattcactgtattcctcatggattcacccgtatgcggtagcggcccgtgatattacgcgcgcgcaggcttttgccgaccaatggcattttgacaaggcttatggatcgtatgaggagttggtggcggacccggatgtggatctggtgtatatcgccaccccgcacagtctgcacgccgaacaggcgatcctgtgtatgaaagccggcaagaacgtgctggtggagaagtcgttcaccgcgaacgccgggcaggcacgtgaggcgctggccgtggccgaggaaaccggcatgctgtgcacggaggccatctggacgcgctacatgcccagccgcaagctcatcaacgaagttatcgagtccggcgagatcggcgaggtgaaagcggcgagcgccaacctgtgctatccggtgtccggcaaggcacgtatgaccgatccggcctgtgccggtggcgcgctgctcgatgtgggcgtgtatccgctgaacttcctggatatggcggtcggcgccgaccatggccgtacacttgatcatttcgatacgtcgatggtgcccgccgaaaccggtgtggatgcgcagaattccaccacgttgtattacagcgacggcacgatggccgtgtccaccagttcgatgctggtttcctccgaccgcggcggctatgtgtggggcaccgagggttatctggtggtcaccaatatcaacaatcccgagtccatcgacatctatgacaacgcccacaagcccgtgcgcagcattgcggtgccgccgcagttgaccggttatgagtatgaggtggccgatgcggccaacgcgctgctggacggcaagatcgaatgcgaggcgatgccgcacgccgacaccatccgcatcatggagctgatggatgcgattcgtgaccgttggggcctgaagttcccgtttgaatcctgatttcagctcccctccagaggggagctgaaattattccgctgaatctgcatctccttcaacaatctgctcatacagccgtacgaggcgttcgtcgcgcacggctttcgttaattcgcactcccatacggtaattacacgccagccagcggcctccagttcggctcgctgcgcgatgtctcgattgtgattgcgcagtagtttcgcctgccagaattccacgttcgatttcggcatcgaatgtttggaacatccttcatgcatgtgccagaaacagccgttgacaaacacgatggcgtggtatttcggcagtactacatccgggtgtccggggtaacgcttgtcgttcttgcggaatcgcaaccccttgcgaaacaggtagctgcgtaccagtacctcaattttggtgtctttgccacgaatatgcgacatcgtgtacgaacgggtaccccgctcatacttctccactggctgtttcttgcgattcacgcactccagactaccgtgacgttgcggcgagaatgagagcctgaacgaacgatcacccatcttgcccgtccgtgtctcttatcgcgggcaacaatcatctgccggtcgagactgcccgattagactgagttcaatggatgacatgacgattcgtagggccacggcggccgatattccccagatcgacgaactgctgcggcaggtgctcgaagtgcatcatgccggccgaccggatctgttcaaaggcggtgtcaagaaatacacggacgaggaattgaaggcgattctggccaacgatcagacccctgtgttcgtggcggttgcgccatctgccaatgacggcaatgacgccgaacataacgccgactcccccgccaccgaccaagtgcttggctacgcattctgcgtgttccagcagcacctcaacagcaatatcctgaccgatatcaaaaccctgtacatcgatgatctatgcgttgacgagcggtcccgcggccaccatgtaggctccaccttgtatcgctacgtgctcgacttcgcccgtcaatccggctgccacaacgtaacgctcaacgtctgggcctgcaaccccaaagcccaagccttctacgaacgcatgggactcactccatattacatcggcatggagcaggtgctgtagcgccgccgtttcagcagcacgatgatggcgatgatcgcagcgaggctgcatagggccacgccatatacaaagcccggagttccgaaattcatgaggcagattgtgatgttaccggtagtggttaccgaaaacacgacgataagcgcgacgatacgaatcatatccagcagtccagctgcttgagccaacagacgctccggtaccaccaatttggccgccgtgcacagcaaagtcgcctgaacggcgagcagaatcgcccattcccagaacatggacggttctttaagcaacgtggtctccggaaacatagacaccacctcattgataaaccacggcgccacaacaatctccacatatgcgagcccaatacaacacacgacaagcaccacggcaatggcatagcgccaagcgacgtctgttttgcgagatttacgagaaatgaatgcgataccagcgttcatggctatgctccttaatccaatatcaatatcaatggatgaacctgcactgcaccgtatgccaccatcataatatatcgaatatcgatataaaaatatcgaaaaacactttcaccattcacctacacatccgcaaacccatgaatacacatgttcttaatcgggatggggagtgcacaaagaagctctgtcaccccagcagattgaggagatcgtccttggtgagggtggcgatggaggcgggggcttcggtgagggcgctggcgccggtgccggcttcgtcggcaagcaaggaagcgtcggtgaactggcgggcgagctcgctcttagtatgctgaagctccaagatacgttcttcgatggtgtccttggccaccacctgatacacgttgacgtcttcggtctggccgatacgatgtgctcggtcggtggcctgatcctgtgcggcggcgttccaccatgggtcggcgtggatgaccacgctggcaccggtcaggttcagtccggtgttgccggccttcagggaaatcaggaaggcaggcgtatcgtccgcattgaactggtcgacgagttcgagacgcttcttcttgggcgtggagccggtgatggtgtagtagcgcaggccttgcgcgtcgaaacgttcggcgatcagatcaaggaagctggtgaactgggagaagatcagcgccttcttgccttcgttcacacaggtttccaccagttcggtgatggcggcaagcttggccgattgatccttggcatcggcgtacagcagcctcggatcgcagcagatctggcgcaacttggtcaactcggcgaggatgcgaatcttcgacgtgttgaaatcggcttcttcgctgtgttcgagctgcattctgagccgctgctcgtgagccgcatacagtttgcgctgttcgccggcaagccgcacggtcagcgtggtctctagcttgtccggcaaatcggtcaacacctgggacttcagcctgcgcttgatgaacacgcccaccaacgactgcaattggcgagatacccgagcggcctcaggattgacttgtgcggcggcccgaccttcagccgtgctgccatccgcggcccgggcattggagatgggcaactcataacgctcatggaatcgcttatatgagccgagcagccccggcatcaggaagtcgaaaatgctccatagttcggagagtcggttttcgatcggcgtgccagtcaaggcgaaacgatggtcggcggccacggccttgaccgctttggctattttcgtggtgtgattcttgatgtactgggcttcatccaatgccatgacattgaaacgttgctcattggcggtgtaatcatcgacatctcggcgcagcaggtcgtatgaggtgatgagcacggtgggttcatccgcccggaacgcacggccgatggcggtacggcgctcggctttggtaccggccaccaccacggcattgaagctcggggcgaacttggtgaattcggcaccccagttgtacaccaaggacgccgggcacacgatcagcgatgggccaaggctgccgtcgcccatctcgccggtattccgctgatatcgagacaggagcaacgcgataagctgcacggatttacccaagcccatctcatcggccagaatgccgccaaaacccttgtcgcacaacgtgttcagccattgaaagccttcgacctgataagggcgcagaatatgcttgagactatccggcacttcatacgacttagggtcgatgatcttgagatcgtcgatgtattcggtgaacgaagcgtccttgactacatcggagccgtcatccggcagctcaccatccagtaggaatgctcgaccgcccggcaactcgatcagtccggagttgagctgctgctcgctcagatcgaggtcgctggccaatcggtccaacgtgctgagattcgcgccgctgagtttgacaagcgtgccgtccttcaactgatggaatcgttgacgccgacggtacgaagatagcaaggcacccacttcgtccggcggcacttcatcagcgaggggtgatatctccaccaagttgcctttgatggacaatccgactttgacgcttggtggcttgggcgcgatcagccggtcaaaagccggtgtggtgaagacctcccccacttcctttagtgccggcaatccctcgtcaaagagacgaacgatctgcgtggtgtcatcgcgatcgatagtggccgcatcagacacgaattttttggtggcctttcgcgcggccggcgttcggaacccattcaccgtctgatgagtggcggccgcaacgcgcttgcgctggtcaggcatggtaaagaattcacgcactacatcaatcgcaagatgctcagcgtcgaaatcacgcccaatcacgccccgagacaaggggatggaacgctctccctcagcatgcaccatcgggccatcgggtagcaacgggacaatggcatcgccgtagcatgccttgacctcgcattgcacaccatgctcatcacgatccagataaaactggaggctgcattccgtagggcttaattcagccagctcgcgaggaatctcactggcctccaacagtccggcgccaaccagctgaggcaatagcgtgcgtgcgaatagggcgatgtcatcgccggcaatgacctgcccctcgccatcgggttcaaacaggtctcccaatagtcctcgcaacggaatcaatcgtttcgggcaacggacgaatcggcatcctgctgcgcttttacgctgagagcccgccatcatggcggataccgcaccggccggattagtggaggcgagcaacagccatacattcttgccgccgtcaatcacggtttccaccgctggcactccggtaagcaggtatccggcatccggaccatacgtattgaaatcacgccgcgcaatgcgcatgagaaaatctggctcgccaccatcaactggcaccgatgcaggctgcccggagaaccatgtgttcagcacgagctgtacgcctctgccctcacgtacggacagcaaccgggccacttccggtgctgaaagcgtcagatgacggtcgatggcgatatgcccgtaatacctgtcctgctgctcggccgcacgacgcacggccatcgcatcatcaaggacgtccagcagtgggcgcgaatcatcatcgagcatatccggcgtatgaataaaggcaagcttctgcccataatccgcatagtcgccgttcgccatggcaagcacaaattgcggaatcgatttcagcacatagctggacccattggaagccgagccgatcttgaactccacactccacacgccgtcgatgaaactcaatatcgggacaagctgcacctgccccaagcccacagtctcgctgtcaccctgatacccgccgcctcgggtgccggcacgagagccgtatccgctttttgtacgccgagcatttgcaccgttttccccttgcgcggcatcaaaccgacgcataaccgcattgcgacgacgaattctggcttgagcatcttgcctatcggcgtgctccatatagtcaatcagcgtccgagacggcctcacagccccggcacggtagccttcaaaacgctgcggatcatcgcagaatatgaaggcgagcgcaatcatgtgcttacacatgccatagccacggccgtaagccggacatgagcacttgccaccgacggcttctcccgtatcgaggtcgaattgcacgctggtacgatacctactcgatgggctggtggtgccacgtagaataccgtcaagctcggcatacccggttcgatgattttcgctgtataccggattgataaccatggtggccgctttgcgcgcaatactacgggcacgagcgagcacggcattcgacgatgacgattccacatcgttgcgtaacgcaaggatagggacggcatgggcttcggcacgcttcgcagacccggcgaaatggccttcgtcctcatcgtcgaaccatacggaacgtccttgcctgaaacgatagggcatcaccgcatcggcggcggacaaactgtccgttccgccaaacgttacgtctctgctgccggccgcgcctgagctaccaagtattccacccgtctcaccagaaatgccgcctactccgccgcttttaccggcatagatgcccctgcccccattagtgtcatcagtgtcatctatgtcataccgaccgtcgtcgtaatcggcatcttcgtcgtctccccttttccaaggattgcgacgacgcaacgcatggccccaggaaacgccggaatcatcatcctcataaggcaggaggccatcgtcatccgcattatcgggaacatggccaaacacaccataccctttgctcatgggcgagcctcctttccagcgaatgtatttcaacccaacgtttccatcctagacgaagcgcgcggtagccttaatgtatggatgcagacaagccggcgcaacgcaaatcctatgcagggaacaccaccctcgaaatcttcgaggtgctgtggcgtcacagctactttgggcatggcctgaccgtgcggcaaatactcgatgaacttgcccgtaaacaccagctggaagatccaagcgaactgccgaccgagaagaccatacgaaatcagctcaaaaagcttaccgccacggaatttctcggcagacatatcgggcatctcgccgaaagtgatcttgccggcatcgaatgcaagaatccacaacccggctggtatcttgatgcattcctgtccactgccgaaatgcgactgctactagacagtcttaccctatctcgcatcagcctcgacaccatggacgacctcatcggtaaaatccgcgagctcgcaggcgccgccgggcaggcagtaggctacctggaccatgtggccacctacacgcatatcaacggtgagttcctatccactatcgaccagctgaatcaagccatcgaagaaggccacggcgtaaccttccaataccgtgattacggaccggatggcaccttgataccgcataaaagccgtacgggtgcaggccgaattacctacaccgccgacccttaccagatggtgtacaagaacggacgctattacctcatctgccacctgcatggcgaagacaacctccgcattttcgtggtcaaccgaatcgccaacgtcagcgccaaaggcaggaacggcacagtgccactggaaaaaccagcaccagctgattttgacgcagtgaacttcatgcgccaccgtccataccccgtagccgatgccccgattcgcatccgcatggccgtacgagacgaatccatgctcaacaacgtgttcgaatggttcgacgaccctcaaatcaaacattcaccggacggcacacagttcgaagtcatcgtcgatgctcccgaacgcgctgtgttctggtgggcattgcagtattcctgggatggccgcgtagtgattcttgagcccgattcgctcaagcgcaaactctatgatgccgggcgtcgcatggccacagcctatgctcccgaatgatgcaacatcacatcgcacacctccttgtcgagttgttcaccagcgaatttcaccggagaacctatcatcccatcgccaatcacactcggtaattttttaccgggaaatacgatttcaagccatttcgcgggcatcgtccctcacctaggcgcacataaggctaaggtgggaatcattaatcgcatcgcgcgtccacaagcgtgcactagcgcgtacaacaataaggagcaactatgagcgaagagcgtaccgcatggggctggggtctggccagcgtagacgccgccggcaccaccctggacgtctggtaccccgaactgaatctcggtgaggcaccggccgagtccgatcgcccgaaccacaatttcggtactttggctcacgatgaggccgacgcccgtggcattcgccgcgtgccggtattcgtcgtcagccagttggacgagccgatcagtaatgccgcggacgcttacctgaagctccatttgatgagcatgcgcatggccaagccgaacacgctgaacctcgacggcatcttcgcccagctcgccaatgtggtgtggaccaactacggccccttcgccgttgaagacttcacgctgcgcaaggccgacgtcgaacgcgcctccaccgaagccgctctcgctttcgcctcccaggccggactgcctgccgcagctcctgccgccactgtcaacgtgttcggtgtggataagttcccgcgcatgatcgattacgtagtgcccaccggcgtgcgcctcggcgacgccgaccgcgtgcgcctcggcgcttacttgtcttccggcaccaccgtgatgcacgccggattcgtgaacttcaatgccggcacgctcggcgtctccatggtcgaaggccgtgtttcgcaaggcgtggtcgtgggtgacggttccgacatcggcggcggtgcctccatcatgggcaccttgtccggtggcggcaagctgcgcaattccatcggcgagcactcgctgctcggcgccaacgccggtatcggcatctctctgggcgataactgcaccgtcgaagccggtctgtacatcaccgccggcactaagatcaccatctgggacaaggccaaggccgccgctggcgaaccgctggaagtggtcaagggtgctgagctctccggcaaagacaacattctgtttatccgcaactcggtgaacggccgcatcgaagcccgctaccgcaaggtgggaattgagctcaacgccaagctgcacaagaactgaaattgaaatagtggagcgttatcttcgttgcccctcggtcgacgtaccttcgtacgccttccctcggtgcgcctcgataccgcacacattatttcaatttcagaactagccctgctagttcttatgcagccgtcgcagcatagctggtttgcgctgtacatatagaaagcgcctcactggaatctccagcgaagcgctttctcaaaccaacaatcaccgctcgtccatcggcacgaaatcgcgctcgaccggaccggtgtagacctggcgtgggcggccgatcttggtattcgggtcggccaacatctcacggtactgcgcaatccaaccgggaatgcggcccagcgcgaacagcgtggtgaacatggccggatcgaagccgatcgcccgataaatcaagcccgtgtagaagtcgacgttcggatacaggttgcgcgatacgaaatattcgtcattcagcgcaatatcttcaagctcggtggccacggcgaacagcgcgcgctcgtcagacggcagcttctgcgtatcttcgcgctccatgatcttttccagatacttcctggcaatcgccgcgcgcggatcatacgacttgtatacacgatggccaaggccggaaatcttctggccattctccttggcatcacgcacgaactcggccacagacttgccggaatcacgaatcgccttcaattggcgcagtacggcctcattcgcaccaccatgcaacggaccggacagcgcattgacgccagcggccaccgccgaatacaggttggcgtgggcggaaccggcgatacgcaccaccgaggtcgagcagttctgctcatggtcggcatgaataatcaacaaacgacccaaagcatgcacatacagcgggtcggattcaaacggctcgtacggcacagcgaagcacatgcgcaggaagtcgtccacatagccgcgcgcgtaatcggggtacagcatcggctcatcgcgacgacggcggaagatgtacgacacaatcgtacgggccttggccatgatgatcttggcggcctcatcaagctggtcgttgtcagaaatatcggtggtgtccgggtagaacgtggccagcgcattgatggcggaggcgagcacgctcatcgggtgagcggagcgcgggaacgaacccatgaaggtacggaagtcttcgccaaccatcgtcttgtgattgatgtccgcacagaactgctcatactcagccctgctcggcagctcgccgtggcgcagcagccacgccacctccagaaaatcggagttctcgcacagttgctcgatggggtaaccgcagtagcgcaaaatcgaatgcttgccgtcgatgtaggtgattttcgattcgcactgcgcggtggtgaggaatccgggatcaagcgttacccagccatcgttgcgcagtttggaaacgacgatgccatccggccctgcactagccttaaccacgggcaggttgaacttgttcgaatcgacatcaagttgtgccgttgccattcgcgcaccttcctcttcatgaaccacttaccccaaacattaacgttcacgcgttcgcgaacactagtgttcggtactctatgtcttctgtgttaccgctggcgaatgccggtcgatacacgaaagccgaagtgcgctcatgctatcaaagcaaacgcacttcggcttgttacgtctcgaattcgcgggaaaaccgcgaacagacggacggctaatgagacgctgatcgcccatcacaggccaatcaggcacccgccatacgccaaacgccgatcagaggttggtgcgatcggtgaaaacgatcgggccgttctcggtgatggcgatggtgtgctcggagtgggcgccgcgcgagccgtcggaggcgcgcagggtccagccgtccttcggatcctggaagatctcgtcggtggtcttgaggaaccacggttcgatggcgatgaccaggccttcgcgcagcttgtagccgtggtgggcgcggccgtcgttcggcacgtgcgggtcgccgtgcatgatgtggcccacgccgtgaccgccgaactcgaggttgatcgggtagccgtattcgcgcgcgacgtcgccgatggtgttggagatgtcgccgagacggttgccgggcttggccacgtcgatggcggcggcgagcgcttcctcagtgcacttgatgatgcgcaggtcttcggggtccgggtctttgccgaccacgaagctgacggcggaatcggccacccagccgtccacagagatggcgagatcgagggagacgaggtcgccgtccttcaggctgtagtcgtacggcacgccgtgcagcacggcgtcgttgacggaggtgcagatgtagtgggcgaacgggccggtgccgaagtcaggagcgtagtcaacatagcaggattcggcgcccttgcggtccacgatcttcttgtggacgaactcgtcgatttcgagcaggttggtaccaactttggtggtctcctgcagttccttcagaatgccgccgacaaaacgaccagccggcttcatttcctcgatttcacgaggggttttcagttcgatcatgagattctttctaccttgttgagacttgttctcaactctagaccagcccgaggtcaaccgccagaagcctacctgaaatccactcgcagcccattaatagccaaggccgagaaaaagcgcccggcagcacatagcctgcacgggcgctttggattgattgtctggggactggttgcatgaagcgtgagattacttgcgacgcttgccgaaagtgaacgcgcgaatcactgaagtaatccccatcaccaccatggcgcatccgccgaagataatcatgaatacggcggagctcagcgggctcatcagcaccacgaagccggcgataatcgagatgatggcataggcgatggcccagccggaatgcgggatacgccacgattcaaccagcgacagcacgccttccataatccatccgaaaccgaccatcaaagtaatgagtaatgccagcgtctgaccggtcatgccgtagttgcgcacaaccaccacgccgccaaaggtcagcagaatgccgacgaacacgtccagcacacgccagccgcccggcagacccggctccacgagagcgctgacgatgcgcaccacgccggaaatcacgaaatacacgccgagcaacaatgcggccaaagccagcgtcttgttcggcaccagcaacagcgcagcgcccaaggcgatggcggccacgcccaccacgccgtaaatgatgcgaatcttggtcttggctttttccggcagccattcctcgatcaggcggaatggactgaaattgccgacataccagttggtctgctgccagccgggttgactttgatcgccccatggaccattcggctgcccgtccgcttggctattcgattggccgtccgcctgataccgccgaccgtccggcccccatgccggctggccgttcgggccatagttcggattgtaggcgtacgggccgtagtacgggttctggttcggttcgccttgtggctggccgttctgcgcatgctgattctgagtgtcttgcgctcccggcgcaccttgcggaggatattggccgccatgattgctgtcatacgcaccatactgcggttggcccggttgacccgccggattcggctggttcggctggctctggttgggctggcccgtctggccattccactggtcctcgttcggattgctcatcgtaactccttagctcaaggtccatgttcagattccacatactatgatagacaagttgtctaatttgaaccatcaccacaattaggcaatctgtctagttcactgacagcgcaatgcccataacgcaatatctgcaccatcaacgcttctcccccgccgcgattaggcttagggccatgaccaacgaaaccgaaacgctgacgtcgggcatcgacccggcatcgttctcctccgtcatcaagccgaccaacgacctgttccgctacgtgaatggcccatggatcgacacctaccgattgcccgacgatcgttcgcgctacggctccttcgacaagcttgccgaagacgccgaaaaccaagtacgcgacatcctcgacgccgacgactgcccggctgtcaagtctgaggccctgtaccgctcattcctcaacaccgacgccatagaggccgccgggcttgacccaatccgcgacgagcttgacctcatcgattccgccatcgacaaggccgcactcacgcgcgtgctcggcacgatcaacccagccggcggccccgatctgttcggcttggccgtttacggcgacccgggcgacccggaccgcaacatcgcccaccttgagcaggccggcctttgtctgccggatgaagcctactatcgcgaggatcactacgctcccgtgcgcgaagcatacgtggcgatggtcgccacccagctggtgaacgccggatacgcgcccgccgccgagtccaacggtggcgatgagctgccgtccaacaccggcgatgacgagagcaacgctcccgccacggttcccagcgaagccgcgctcggcatggcccgccacttccttgccgtggaaaccaagatcgccgccaaccattgggacaatgtggccacgcgcgactcggtgaagacctacaaccccaccgattacgccgatctggccgccacgctgaaaaacttcgatctcggttcttggatcgacgcttggcagaccgcttatgacgccaccgaagccgccaaggctcagccgattgatttcaagtctgtgttcgcgcgcgtcattgtgcacgagccgagcttcctcactggtcttgatgcgttctgggccgaggccgatctggccgaccttaagctgtgggcccgtgttcacatgattctgggcttcgcctcctccctgtctcgcgacttcgacaccaccaactttgacttctacggcaaggtgctctccggcgccaagaagcagcgcgatcgttggaagcgcgcggtgagcctggtcaacggcatttgtggtgaagatgtgggccgcgaatacgtgcgcctgcacttccctgaaagctcgaagcgccgcatggaagagctggtcgccaatctgattgacgcctaccgcgtgtccatcaccaattccgattggctgggcgaaaacaccaaggccaaggctctggagaagatctccaagttcacgccgaagatcggctacaccaaccactggcgcgattattcggcgctgagtgtttccgcggatgcgctgcccgccgagaacgccaaggccgcgaacctgtacgagaccggctatcagctggccaaggtcggcaagtcggtcgacaaggacgaatggctgatgaatccgcagacggtgaacgcctactacgagccaagcatgaacgtcatcgtgttcccggccgcgattctgcagcccccgttcttcgacccgaaggccgaggatgcggcgaactacggcggcatcggcgcagtgatcggccacgagatcggccatggcttcgacgatcagggttcgcagtacgacggcgacggcaagctcaacaactggtggaccgacgaggatcgcaagaacttcgaggcccgtaccggcgcattgatcgcccagtacaacagctttgtgccgctgcagctggccgagaagtacgctgacgagccggataaggcaccacatgtgaacggcgcgctgaccatcggcgagaatatcggcgatttgggcggcgtgaacatcgcgctcaaggcgtatgcattcgcgctcggcaaggcggcaggtaagtccgacgctgaagaagacggctcccccgccgccatcaaggcactgctcgataccgcccccgaaatggacggattcaccggcctgcagcgcttcttcctgagctacgcctccatctggcgcaccaagaaccgcgacgagctggccgaacagtacctgcagatcgacccgcattctccggccgaattccgcaccaacggcatcgccagcaacgtggacctcttctacgatgcctttggcgtgaccgaaggcgacgccatgtggctcgcacccaaggaccgtgtacgcatttggtaatccccgttatgtaaaagaaaaccgctgtgcttgcctcgattacaggcgaacacagcggtttttcatgatgtatggttggcactcagaattcggaatcactgggattggaagattcggcgaaaccgtcgacgtgggtttgttgggccacgggctgtggttgattggtgccggcgtccggttgcgacatgacggcatcggccacggccgcggactcggttgatggcgacggcgattggccggaatcggaggtgaccccaaattcgacggggccagattccgacgaggtcgcatacgggtcaatacccacaccggatgcggcaccgcccgcgccatattgcgttggcctaacgtacggcgatgatgctcgttgcccgtttccgccatccataccttcgacggcaccgttggcattgccgttaccgttgccaccattgcctccgttcccattaccggcacgctgtggcttgatcagcgacgtggtgccgaaggtcaggtcatgcccaatgttggtggcttcgagaacggttctactgcgcggttcgccttgctcattggtccactgctcggtgatgagtgagccgaccacaatgatgcggtcaccgcggcgaaccgaactggcggcgttcacggccaaagcacggaacgctttgacgcccacccatgcggttccgtaatcctcccattgtctggtagtcgggttgagtcgactgcgcgtgctgcccatacggaatgtcagcacgcggaagctctcggttccgcctagtgtcggatcaccggccacaaagccggtgacggtcactgctgcttgttgatttgccatgatcggtcctttcctcggcctgctggcctgttgtttggatgtggaccgccggagcctgtctccggcttcattgccggcttgcacgccccagcggtacctccactgtgaggcatgacgtttgaagtgcacaagggcaactggcaaatgtggatactgtgacgcagttgaatttttaagaatgtggataagtttcggttatccacagcaaagcgccattctgcgactgggcagaatggcgcttgatgcgattaacgccgaggctgagtaagtgggactcaactgagggcggcgaagcgctcggcgagcgcgtcggcggcttcggcggcgggcacggcgaccttgttttcgccgttgcggtcgcgcagttcgatggtgccgtcgttgacgtaatcgcggccgaccacggcgaccagcggcacgccgatcagctcggcatccttgaacttgacgcccggagacaccttcttgcggtcatcgtaaataacctcaagacccttggcctcaagctcggcgaccagcttctcggcaccttcaaacgccacggcgtccttgccggtggccaccacgtgcacggcagccggggcaatcacggacggccaagccaagccggcttcgtcgtggtgtgtttcggcgatgcaggccagcacgcgggaaacaccgatgccatagcagcccatccacaccggcacggccttgccgttctggtcgagcaccttcaggtccagtgccttggagtacttgagacccagctggaacacctgaccgatttccacaccacgctcgaagctcaacggaccggaaccgtccgggctcatgtcgccgtggcgaacctcaacggcttccaccacgccgtcggccttgaagtcacggccgtacaccaagttgtagtagtcgacctcgttctcatcggcaccagtgaaccaagcggaacccttgaccacgtgcgcgtcgatcaggtagcgaaccgggttcttcacgccagcagcctcggcctgcgggccaagcaccatcggtccgatgtagccgggcaccagttcagggtgctgcttcaggtcttcctcagtggcttcctcaagttcggcgggcgcgaactgggcttccagtcgcttcatatccaccgtacggtcgccgggcacgccgacgacaatcacttcacgccacggctcgtcatgctcttcatcctcagggtgcttgacggtgatcaccacgttcttgaggatgtcggaagcctgccattcacggccatcagtacgcgggtggtcggcgttggcacgctcaatcatgttgtcgatggtcttggcatccggggtggcttccttggaagcggcgggagtggtggaagcatcgatttccggcagctccggagtgctcagggcctcaacattccatgccttgccggaaggtgccagcgcgaaggtatcttcgccgatcggcatcggagccaggaactcctcggatgcggagccgcccatcgggccggacatggcgaacacaggtacgtacttcaggtcgaggcgctggaagatacgctcgtaagcgccgcgctcgtcatagtaggccttgcgcatgccttcttcatcgatggtgaaggaataggcgtccttcatgacgaattcacgaccacggatcaggccggcgcgcggacggaactcgtcgcggtacttggtctggatctggtacagggtgacgggcaggtccttgtaagaggagtacatgtccttgaccagaagggtgaacatctcctcgtgggtgggagccagcaggtaatcggcctcgtggcgatccttcaaacggaagatgttatcgccgtactcctcccagcgatgggtggcctcgtagggttcgcgcggcagcagggctgggaagtgcacttcctgggcgccgatgccgttgatctcctcgcggatgatggcctcgatcttgttcagcacgcgcagaccgagcggcagccaggtccagataccgggtgcggccttgcgaatatagccggcgcgctgcagcagcttggctgaatcgacatcggcatcagcggggtcctcgcgcagggtgcgcaggaacatggttgacatacgaagggtattggaagtcatgtgttccacgatattcgcgtgaaccgacaagcccgcctgctattcgcactattccgaccttcatcttggcattcggactcactcgtgcaacaatgacggctagaagggtagaagggcacgatgacgcaaccgaccgagcaacaggggaatcagccggaatcctcggagcagccggtgtatcaaccggccccagcatgggccccgcaattttctgctgcagcccccgcaattcccaacggcagttccgcaacaagcggtatcgcaacagccaatggccatgccaccgtttgcgcaatcgcctatgtcggtcccggaacaagcagcctgcccgtatcaaccgtaacagccgggccgggcctatgcttctccccgcccctacccgaatccggcaatggcccagccgaaccaaccatcagtcgcgcaagagcgattcgggcgttcgtcgggacgtctgaccgcatcacaggttattgagacatgcgccaccattcttgccggcgtaatactcctcggtcttgcatggaccaacccgcaaccgtatgccccggtggatcttatcgccggcctgtccggagcggccgcgctgattgtgggtgtgcgtttgccgcaagtacgcccgacgctgcgtagctggccggcattgtggcttgctttgggcggcatcattctgattgtggcagccgcgcgctatgaggcgagcctcaaatcgatgaggacgatcgccgcgcgtattggcgatctgcggtgaatcgcgcgggcgacctgaggcagattaccaacgtccggcgatagcagtcctgcatacggggcagtgtccattgccaccgtatccggcagataaacgattggcaatgattcgataccaatcgcgttccacgagcttggcccggcattcagggtttgggcaatacgtggtatcgccttcacgatcatgcacgttgccggtgtacacataattgagtccctcttcgagggcgatgtctcgggcgcgggtcagagtctcgtgcggggtgggcggtacgtccatcatgcggtaactggggtggaatgcggagaagtgcagcggcacgtccgggcccaagtgctcgcgtatccatgtacattcagcatgcagctgggcgtcgtcatcgttgagtccagggatgagtagcgtggtgagctccacccacacgtgttcgccttctggtgtgcgtgcctcgttgaccgcatagtcgatggtctcgagcacatcggtcagatgagtgccggtcactttccaatagaactcttcggtgaagcctttgaggtcgatgttggcggcgtccatggccgcgtagaagtcgggccgggcttcggcgctcatgtatccggcagtcacggcgatgggatggatgccgagcgctcggcaggcttcggccgtgtcgatggcatattcggcgaacacgatcggatcgttataggtgaacgccaccgagtcgatgcctcggtcggccgcgacctgcgcgattttctccggactggcttccacgccgagccggtcgaaactgcgggctttggcaatatcccaattctggcagaatcggcaaccggaattgcagccagccgtgccgaaactcagcacgctggaaccggggtggaagtggttgagcggcttcttttccactgggtccacggcgaagccggagctgcggccgtaggtgtcggagacgatgagtccgtcgtggttcgagcggacgaagcaaaagccacgttggtcgggcttgaggacgcagcggcgcgggcatagttcgcagcgagcgcggttggtaccgtcgtggaattgcgtttgccagcgggctatggcggggttacgaacatctgtgactgacgccgtatgaccgcaccccggtgaccacccgattcccgatgaccaccctccggcgcttcgcgccacctcttgccagcgggaggagatatggttgctgcgttaatgctcggcataggcggtcacctcgtagcgttgacagtcgatttcgccatcgttccagtcgtaggacgggcggataccggccttggcgagcaggtgagcgacgaaatcgtgcggattgggcagctcatcccacacttgtggcaggaatgtggcgctgcggccacgacggtcggcgagaatcagaccgtctttgccggggcgtaatacttcctcaagttcagtgcgcgaacgtaccgggcgttcgacgttgctgccgtcccgtttgacggcgtcggtctgaggtccggattgcagcgatgccagagtcgcggtcttcgagccggtatcgcgcgaatcggcgtcacaggagttcacggtaatcggctcgggctcgcctaagacggatacctccacgttgagcaacgggtattccgcggcggtgaccgggttgaaacgtgggtcacgggtggcggcgtccaccgcacgtgcagctatgtccttgccgagcgagcggtgggcggccagcgaaccgatgcacccgcgtagccggccaccctcggtcagggtaacgaaacaggcaccggactcgttcagccatgggtttgcggcaagaatggacgcggtcgaatcggcggctgttggatgttcaatatgcaaccgttcccggatagcggcacgggcgagtttcagcagcacatcaccatgggctggcgttcccgattcgcctaagtcatctgcaccggctggagcatctgcttctggtttggattcccacgcggcaaacgagacatatcccactaccggctcgtcggcgtctcgcattgcggggcgaggttggccggcaagcgccaccacgccgtcgtcgccggaagtggaacagccgagctcgaagagcttcatgtccttgcggccttttaacacatccagaaggccgttgatcgggtatgcgccacaggcccggcgagggtgaatcggcagatgcaaagccgcaatgtccgcaatggtctggtcatccaacgcgcgggcgacttcgtgcggatgatagtgcgagagatccgaactaatcacgatgacggtttccgggccaccccacaaagcacgcaacacatcgcccgcctcttgtggcgtggcatcgcccgcgttcaacggcacaatagtgaggtctgggccgagcacggtttgcaggaacggaatctgcacttctaccgcatgttcttgtgcgtgggttggggcattgacgatcattgcgggagccggcgcgcccggacgggcatgtgtaccggagcgcaatggctcattgacagacaggcccagagccttacgctcggctgcaatgtctaccggcacagtgcccagcggcgtttcaaacgccgctgccgtggaacaggcgacgcctcgcacggccacgcggtgagtcggccctacgattaccgcgcgagtcacgctcccccgcccacgctccaagagcgcgtaagcgagcgcagctgccgtgccggaatatatgtatccggcgtgcggcactattaccgccctcggcacccccgctggaagtgtgggctccaactgttgcagaagctttcggccgtaatcgagctgctggttgattagctgtttgagcgcggtgcggtcagccggataaaacgaaccggccaccgctgacggacgtattgcgccagtgattttgccgctgccgtctgccgcgcttgctgcatctgacgcactagccacactgaccgtatcgatttgcacaccggctcgggcggcctcgcgaacctcattgtttccacgaaatatctcggatagcaccataactaccacctcttattccatggtagctgctacggagcgcttctaaagatcagaataacgcgtcttgggcgaagtcatcgtcgggattggcaccgaattcgtccggctcagcaggtttgaacgcgcttgcaccttcatcggccaactggtcggaggccgcggccgaggcttcgcgcaggtcgccgtcgagcgccacggcatcgggcgagacgaggaacatgcgttcgttgacgccggccaaatagaggccgcccaacgattcgactcgggacagcgccacataccccatgcctggcgcgaaggtgcgcttcagatccataaccgcacggtcaagcgtcatgccttgcgacttgtggatggtgatgccccacgcgcagcgcaacggcacctgggagacggaggcgagcacggtgtcgccgtccatcatctcccatgtggcctgtttcatggtgacgatgttgccgttctcgaattccacgatcggccagccgcccttgttctcctgtgcgaagccacgcacggtgccgagcgagccgttgacgtactggcgatcggtgtcgttgcgcagggccatgacagccgcgccttccttgagtatcagtcgcccgggggccaacatgttctttttgagtcggtcgaccaggttggcagggcctgctgtctcggcgtggaactcgtgcggctcaagcatgatctggttcaggcgcatgtcgttgagattgtcggcctgccggttcaccgggaacaggtggacggcgacctggccgggctcgggcagtttgcccagacgagtgacgagcacgtcacggtcggactgggtcacgtcgccttcgcgaatgtcggtgagcacggtcagcagttcgccggtatcctgacggtgctgttcggtcagatagcagatcaccgggttgagttcgggccataccagcgattcggtgatgaagccttcggggttcaagccggcacgggcataccgttcgcgactggcgatgaattcgggcgtgggggcgatgaggtcgcggttgcgcccggacaccgaaaccggcggcagttggaagaagtcgccggacaagacaacctggatgccaccgaacgggcgtggatcacggcgtacttcgcggcagacttggtcgaccatgtcgaacagccaggcgtgcagcatggaaacctcgtcgatgacgaggatgtccgtggcctgaatcttgcgtttgcgccgggatttgatgagtttgagcaggctggcgctcagggcggtggccacgccgacgccgctccacgaatggatggtttggccgttgatatgcgtggaggcgatgcctgtggacgcggtgactgccacactggcgccgtcggcccgagcctggcggatgaactcgttcaagacataagtcttgccggcaccgggcgcaccggtcaggaacacgttcgcgccggcgttcagaatggccagggcttcggtttggcgcatatcaacctctctagactcccctcagggaggggagccaagtacggcggactacttattgaggatgctggtggctactatgtcggcggcgatggccttggatgcggcatcgtccgggccgggggcgggggccataaacgccttgcggtagtagcgcagctcgtccaaggattcgatgatgtctgcgagagcacgatggccaccgttctttggcgggcggttctcgtagacggccgggtaccagcggcgggcgagctccttgaatgtgctcacatccacgctgcggtaatgcaggtggctcatgaggttcggcatgtaatggtcgaggaacttcttatcggagccgatggtgttgccggccagcagcgggcgcacgccttccggcgtgaagcgcagcacgtattcggtgaccttctgctcggcctcggccaggctcaggccattctcccactcgttgatcaggccagaacgggtgtgcatctggcgcacgaaatcgttcatgtggttcacggccttctcggacggcttgatgacgtaatccacgccctcgtccagcacattcaaatcgaaatcagtgggcactacggacacttcgaccagttcgtcgccgccgaagatatccaagcccgtcatttcgcagtcaatccaaatcaggcgcgaatcctttgcgctgtaagtttctgcatcatggctgtcgaccatggtaagcctcttttcgtcatgtcacccgttattacaagaacagttcagactataccccagcgcatacaagctatctcgagccacatacgcgaaaagggcctgcataagcagacccttttcacaaggaatcaacccctaactagcgcaagctagcgggcatcaaccgatcagttgttgtggaagccggagtagttcggggcttcggtggtcatcacgatgtcgtgcgggtgcgattcgcgcaggccggcgtcggtgatgcggatgaacttgccgcgttccggcatttcggcgatgttgtgtgcaccgatgtagaacatggactggtgcaggccaccgagcatctggtagagcacggcgttcagtgggccgcggtacggcacttcgccttccacgccttccggcacgaccttgtcgctggaggtcacgtcggcctggaagtagcggtccttggagtaggacttcttgccgcgcggggccatggcaccgagggagcccatgccacggtacagcttgtactgcttgccgtgcaggagcaccttctcgcccggggcttcctcacagccagcgagcgtgccgccgagcatcacggaggaggcgccggccacgagggccttggcgatgtcaccggagtagtggatgccaccgtcggcgatgcagggcacgccagcggcacggcaggcctgggcggcctcgtacacggcggtgagctgcgggacaccgacaccggcaacgatacgggtggtgcagatggagccggggccaataccgaccttgacggcgtccgcgccagcctcaatcatggcctgagcaccggagcgggtgccgacgttgccgccgatgatctgcacgccgtcgaaggcggagtcgtgcttcaggcgggaaatcatgtcgagtgccagacgggcctcaccgttggcggtgtcgaccacgagcacgtccacgccagcctccatcagagcggaggcacgctgccaggcgtcgccgaggaagccgacgccggcggccacgcgcagacgaccctgctcatccttggtggcgtccgggtactgctcggtcttgacgaagtccttgacggtgatcaggccggtcaggtggccttcctcgtcaacgagcggcagcttctcaaccttgtgctgggcgagcagacggtgagcgtcgtccttggaaatgttggacgggccagtgaccaggttctccttggtcatgacatccttaaccttcagggtgtcgtaatcctcggaggcgatgaagcgcatatcacggttggtgatgatgccgacgagcttgttttccttgtccacaaccggcagaccggagatgtggaacttgccgcacagcttgtcgaggtcggccagagtgacctcggggttgacggtcagcgggtcggtgatcataccggactcggaacgcttgaccacatcgacctgagcggcctggtcgtcgatggacagattgcggtgcagcacaccgataccaccgttacgagccatggcgatggccatctcggactcggtcacggtatccatggcagcggagaggaccggggccttcatcgtgatcttacgggtcagatgagtgctggtgtccacttcggagggaatgacatccgtctcgttcggcagcagcaacacatcatcataagcaaggccgagcttggcgaaaatcggaggaaggggagcatacgccgattgggcgttcaattcatcgaggtttgtagccatacaaacactatatgaacacgcgctgaccttcacgacacacgcttgtgagcgctcacttatccgctgccgggtcctgcacctcacccgcctgcgagtcccgcgaatccgcaggcgaatcagtcatcgaatccgctgcctgagagccaatcgaatcccggctctcccctactgcagactgcgatttagccgtagcatgctgcgcgttcttgcgtgcggattcgagcatcaggttctcggcttggatctcgggaatacgatgccgcagataggggtacatcgtggctatggtcagcaccaccacggcgatgggcatgcccacggccacatgctgcgctttgaagaacagaatcgtcagcgaaccgaatgcgatcagcgcggcccatccccacaggatcagcacagcgccacgcaccgaatgcccgatcttcagcatgcgatggtgcaggtgcatacggtccggatgcatgggcgactggcctttggccaaacgccgcacaatcgccagacacatgtcaagcacaggcaggaacaacaccagaatcggcagcagaattggcatgaacaccggcagatagatgctggcatgaatcgaggccgggtcaagacgtccggtcatcacaatcgaagcgcaggtgatgagatagccaagcagcatcgaaccggaatcacccatgaacagtttggcgggatgccaattatgcagcaggaagcccacgcagatacccaccatcatcacgtcgatcagcgtggccaacgaagcataactcggggaagaccgggcgatgatatacgaataggcggcgaacgctatgccaccaatcgccacgataccggccgccagaccatcgaggccatcaacgaaattgaccgcgttaatcgaggcgacgatcaggaatgcggtgatcgccatggacagactcggcgaggcggtaatcagcgaaccgcccaaaggcagtgagatgatctgcaatccgccccaagccacgaatacggaaatcagcagctgaccggcaagtttcagcatccaatcgagatcccacaggtcatcggccatgcccagcagactgatcatgatgccgccggcaagaatcacccacatctggtaattgccgttgaacaatcccgagagaaaaggcagccgactggcgaatacggtagccacggcaaaaccgatcagcatgccaaggccgcccatgcgcggcgtgggaatggtgtgcacgtctcgggcacgcacctcgccaaccgcaccgatttcgatggcgacgtggcgaatcagcggagtcaccagccaggtgacgccaccggcgatggcggcaatcagtaggtagattctcatgcgccgagtcccccgccgttgaggtggagggccttgcgaatcacgttttgggcgatgacgccttcacgcaggatctcgatgccgtcgcgcgcgtacggatcggctttgacgacggtgctggagacatggccttgggtagggccgccgtccagatacaggtcgacttcgctgccgaacgcatcaaccgcctcctggacggtctgtgcgctttcgtcgccggaacggttggcgctggacgcagccagcggaccagtggccttgagaatcgcgaggcacagcgccgaattggggatgcggatgccttgcgtgccggggcgaccatcggcggtgtcggccaaagtctccaacgtgcagtcgggccgggctacggcaatcggcgagaacgcgccgggcaggaacgccgccgacaaacgattcagtggagacggcaggtctagaccgagttcatcaagctggtcggtggatgcgagcagtacctgcaacgccttatagcgcgggcgacgcttgagccggtagatacggtcgatagcggccttattacgcggatcgcacgccactccatataccgtatccgttggaatgacgaccaatccaccatcccggatgacacgcgccgcctgtgccagcgattcatccgtgactttcagcgttgttccgccttccacgctcacgccacctccgttcgcttgtgtattcacaatctaccattgcaccattgcgccccgacttgcatagttcatcatcgctcgtttgccgtactgccgttttccgattcgccccacacgcacagaccgtagatacaatgagtccatccatgctctttcgcgaaattacaggagtgttcaatgagcgaaatcaatgctgaatccaccaccatgcctcccgtcgaactgcgtatgccgcgcgccagcgagcgcgaggagatgctcgccggcaaactgtacaattcggtagaccctgaattgaatgccctgcgcgagaaggccggcgacctgtgcgcgcgcttcaacgccgcgtcgcgtaccgatcatgccgcccgtgccgcgattctcgatgagctgctgcccggccacggtgccggccttgacgtgatggggccgattttcttcgactatggctgcaacatcaccatcggcgagcgcgtgttcgccaacttcaacttcactgtgctggattgttgcccggtgacgattggcgacgacgtgctgttcggcccgaacgtttcgctgctgccaccgatgcatccgttgcgttggcaggatcgtaacgtgaggcaggcacctgatggttccgtatacgactgcgagtatggcaagccgattgtcatcggctcgaactgctggtttggcggcaatgtgacggtaatcggcggcgtgacgatcggcgagggttgcgtgatcggtgccggctcggtggtgacgcgcgatattccgccgcacaccgtggccgtgggcaatccggcccgtccgattcgcaagattacggataaggatgcttccgcgctacagtattacgcgcagtgatatatgaatgctcccgctggcgagctgtcagcggagctgactgagggtggttgccggaaatctccgataaccaccctcagcctcacttcgtgaggtagctcccgccagcgggagcatagtaatgtgagacgtcacgcgccgaggtacgccttgcgcaccttctcgtcgtgcagcaggtcggaggccttgccctccatggtgatcttgccggtctcgagcacgtaggcgcgatccgcgatggacagggccatcttcgcgttctgctccacgagcagcacggtgatgccacgcttgcgcagcgtgacgatgatgtcgaagatctccttgaccagcagcggggacagacccatcgacggctcatccatgaggatggtcttcggatggctcatcagggcgcggcccatggccaccatctgctgctcaccgccggaaagcgtgccggccagctggcggcgacgttccttcaaacgcgggaagtagtcgaacaccatctcaagatccttacccagactggactggtctttgagactgaacgcgcccatctctaggttctcctgcacgctcatgcgggtgaacacgtggcggccttccggcacatgggccatgcccagcgtgacgatcttgttcgcatgcgttttgagcagatcgtggccatcataggtaatgctgccggatttggcaggcaccagaccggtgatggtgtgcagggtggtggtcttgccggcgccgttggctccgatcagggagacgatctcgccgtcgttcaccttgaggctaatgcccttgaccgcgtcgatcgcgccataggaaacgcatagatccttgatttccagcatcagcgcgctccttccgtcagtgtcttggcaatgcttggctccggttccgccttggtggtggaatcgccgtccgcgtcatcgttgttgtcgctgcccaagtaggcggagatgacctgcgggttgttggcgatctcctccggcgtgccggatgcgatggtgcggccatagtccagcacctggatgcgctggcatacgctcatcaccaggctcatgtcatgttcgatgagcaggatggcgataccgaaacggtcgcggatcgtgttgatgcagtgcagcagatcctcggtttcggtggggttcatgccggcggccggctcgtcgagcagcagcagtttcatgccggtggccagggcgcgtgcgatctcgagcttgcgctgctggccgtacggcaggttggccgcctgggtggtggccagtccctcgaggttgaagatgcgcagcaggtcgatggccttctcgtgcatctcgttctcctgcttccagaagcccggggtgcggaagatggcgctgcccatgtggtaggtgaacgactcatcgaaggcgacgagcacgttctcctcgacggtgagctgcttgaacaggcggatgttctggaaggttcgggcgatgccggcacgcacgacctgataggtcttcttgccgttcatccgggttccgtccagccagaactcgccttcggtgggcttgtacacgccggtcagcaggttgaacaccgtggtcttgccggcgccgttggggccgatcaggccaatgagttcgcccttgttgatggtcatgttgaagttggacacggctttcagaccaccgaaggtgatgccgagatgttcggctttgaggatgggctgggttgcgtcgctcatcgtgaggcctccttcacggtcttgtcgtcggactggtcatgctgcttggcgctggccgcgggtttcgcgcccttgccggcggcgccgcggaacagcatgcggttgaccagacgcggcagtgagaactcccaggatccgaagatgccctgcgggcggaagatcatgacgagcaccagcaccaccgagtaggcgagcatacggtagtcggcgaaggcgcgcagcagctcgggcaggatggtcaggccgatggcggagacgatcgagccggtgagcgaacccatgccgccgaacaccaccatgatcacgtagttgatggagttgagccaaccggccatggtggggttgagcgagccgatgtactgggcgaagataccgccggcgatgcccgcgaagaacgcggagatcgcgaagacgagcaccttgaggtacgtggtgttgagtccggaggcgccggcggcgatctcgtcgtcgcggatggccttgaccgcacggccgtaacgggagcggccgaacatgaagagtacgaccacggtgaccaccatgatccagaacacgacgtacaggttggcggtgcgttcgatgccgatcagcgcctgtccggcggcgcccttgtcgaggcccatgccgccggctaccttgaggttctggatgatcacgcggatgatctcaccgaagcccagcgtgatgatggccaggtagtcgccgtgcagtcgcagggcaggaatgccgatcaggatgccgaacacgcaggctaccacgccgccgatcagcgtggtgagcaggaagcgggcggtggggtcgatggcaatgccggcggcgaccatgtatttggaggtcagtgcggccacgtaggcgccgatggcctcgaaaccgcagcagcccagcgtcagctggccgagcacgccgatggtgaggttcagggaggtggtcatgatgatggcgatgcacgcggtcatcatgatgcccttgatgtaggagtcggccaagccggattcgcacagcgccatcacgatgccgaacgcggcgaggatgccgatgaagcacaccagataggactgtttggtggaaagcattgtcttcttcatctgatcagaccttctccccttcgttcttgcccataatgccggacggtttgacgagcagcacgatgatcaggatggcgaacacgatggcgtcggagaacgccgaggtgatgatgcccgccgtgatggtgccgatatacgccttggtcaggctttcgatcagaccgatggccagaccaccgatcatggcgcccgggatggaaccaatgccgccgagcacggcggcgacgaacgccttcaggcccagcatggcgcccatcataggcgagacctgcgggtaggcggcgcagtacatcagcgaggcgaccgcggccagaccggagccgatggcgaatgtcagggcgatggtggagttcacgttgatacccatgagcacggcggcctccttgtcttcggagacggcgcgcatggccttgccctgcctggtgaatttgacgaacagctgcaggcccaccatgatgaccaggccgatgacgatggtcagcagggtgtctcccggcagcttgagcttgccgaacgcgatggacggcaggtggaagatggtcgggacggtctggaagtcggcgccgaagatggcctgtgagccgttctccagcagcaacgacatggcgatggcggtgatcagggcggtcatggagttgcccttttcacgcaccggcttataggcggccttttcgacgatcacgccgacggccacgcataccaggatggcgggaatgaccgccacccaggcgggcagtcccatggccacgatggccggaatggtgagcatgagcacgtaggctccgaccatgatgaaatcgccgtgggcaaagttgatcagtcggatgatgccgtagaccatggtgtagcccaatgccaccagcgcgtacacgctgccgattttcagaccgttgaacagctggctgatgaacatgatgatctgatcggtcatagctccccctttctatcaatgttgtggttctctaccgctgcgcgcgtagagatattcgtatgtcttgcgattgatggcgcgatacgcccgcgcctggcgatatccgcatatcgacggctgtccttatgcatccgagcccatgaaaacacgaaagggagaggaccggcaaaaccggtcgctctcctgttcatgcggaagtcatgctaggacatcgtgattatgcggtgggaattcatggaattcacttgggctgcacggtggtgttgtacaccggcttgccgtccttcatttccagcacggtcacggacttggtcggcgagccggacttgtccatggtgaacttgccggtcacaccgtcgaaggtcatgccggccacggcgttgcgcacatcctcacgggtggcgttctcgccagccttctcgatggcctgcttgatcatgtagatggtgtcgtagcccagagcggcgaacgtgttcggctcggcgttgttcttggacttgtaggacttgatgaagtcctgcaccttggtgttggtgttgtcgtcggcggagtagtgggtggtgtagtaggtcttgttgtactgggacttgtcaccggtgagcttgaggccatcgtatccgtcgggtcccatcacgtagccctcgaaacccacggagcgggcctgcgggatgatgtacgggccagccacggagtagtagtacggagcgtagagcagctcggcgccggaagcctggatcttctgcagctgggcggagtactcggtgtcgtcggcggaggaggagctttccttgtccaccacttcgaggccgagcttttcggcggccttggcgaaggcctctcccacgccggaggagtacggatcgccggtgccgtagagcacggccaccttcttgaccttcaggttctcggcggcgaagcgtgcagccacctcaccctggtaggagtccttgaagcaggtgcggaacaggtaattgccggtttcgatggagtcggaggtggcggccggggcgatggtgaccagcttggactggtcggccagcggggccacggctgcggtggtggcggaaatggtcgggccggccacggcgagcacgttgttgtcgccggcgagcttgttgtaggcgttggaggcttcggtggcgtcgcccttgtcgtccatggactcgagcttgaccttcttgccgttgatgccgcccttggcgttgatctcggagaccgccagctcgaagcccttgacctcggcctcgccgtaagcggcggcggtaccggagttggtggtcacggtgccgatggtgatggagtcgccggaggccttggcactggagctggaggaatcatccatgctgccgccggagcagcccgcgagggacaacgccataacagcggccgcgctggccgcaacgaacttagtggagaacttcacgttcatcctcttccttcttccttgggatatttcaacatcgttcatctgtcaaccaacgcgcgggatgtgcgcgtgagacgttccactcacataattcgcataccacagaactacatcacacggcttgtgaccgtcattcacgtctctctcatccgatgtttgtcgcggactgttataaccagaccggctttgaacccgcaataaattgttcttattatgagacagcgcaattacggaaacgagaatacaatcccaaggaaatgtgggattcgtggggcttaggacactgcaaacaggtagcggtcgcgacccgtccagtcctggccggtcgatgcggcagcgaatccggtggccctggcaaaggccacgagacgatccccctgggtcacgtcatgttccatgacaagcacgcccccaggcttgagaagacggcaggcccgctcgataatgcgctcgggaatcaacgtaccgtccatcgagccgccatacaaagccaattccggatcccaatcacgcacttccggctgctcgggaatatcggtctgcggcacgtaggggggattggtgatgacgatatcgacggtgccgtccaattgggccaatgtggcgaaggacgtggcatccgcgatttccagatggtaattcgaggcaatggatgggtactttttcgcggtttccgacagattccttcgcgtccattcggcggtgttcggcgacagctccaccgcccacacctggctgccgggcacctcgctgacaacggacagcccaatcgcgccggagccggcgcacaaatcgaccacacaaggatggatcatgccgttttttgtcagccagtcaaggccggcctgcaccacggtttcggtttccggacgaggaatgaacactccgggaccgaccttcaggtcaaggtagcggaaaggagcatgcccggtgatgtattgcagcggctcgcgcttggcacggcggtcgagcatggcacggaagacggcaagctgtccggttgtgccaagttcctcccccataagcagagccctgtcgacgtcgcgcagttcaacgcctgccgcctcggcaaggagcaacttggcatcatgctcaggcgtctcaatacccgcttcgcgcaattgcgaagaggcttggttgatgatgtcagtaataagcactggcggtctccgttgatcggacattaggctcccctcagtcagcttcgctgacagctcccctcacagaggggagccatccggcaaagtcatttctgattggccagacggtcggcctcgtcggcttggatgtcggaatcgatgacggcctgcaggtcgccgtcgagcacggcgtcaaggttgtaagccttgtaattcgtgcgatggtcgacgatacggttttccgggaagttgtatgtgcggattcgctcggagcgatcaagcgaacgtacctgcgagtgacgcatgtcggcggcctcggcggcctcctgctcatgcttcatggccagcaggcgggacttcagtacgcgcaacgcggcggcacggttctgaatctgcgacttctcatcctgcatgttcaccgtgattccggttggcaggtgggtcatgcgcacggcggaatacgtggtgttcacggactggccgccggggccggagctcatgaagatgtcgattttcaggtctttcggatcgatctcgatctcgtcgtcatcctcgtcggcctcggggaacacgatgacgccggcagcggaagtctggatacggccctgcgattcggtgacggggatgcgctgcacacggtgtacgccgccctcgtacttcatcgaagcccacacgccgtcttcgggagcgggcgtgcccttggcgcggatggcgatctgcacgtccttgacgccgccgagctcggtggtgttctcggactgcacgttcacgctccagccacgcttctcggcgtaacgggtgtacatgcgcagcaggtcgccggcgaacagtgcggcttcctcgccgccggtgccagccttgatttccatgatggtgtcgcgcgcatcatccgggtcacgcgggatcagcgcggtgcgcagcttctcctcgacaccgggcagttcgtcttcaagacgcttggcttcctcggcgaagtcggcgtcctcgccggccatctcctgagcggctgccagatcgtccttcacctgcaaccaggctttgtaggcacccacgatggcacccagttcggcgtgacgacgacccagcttgcgcagcttgtccgggttggacacgacttcggggcttgccatctgttcttcgatggactggtactcctcaagcgcggttgccgccgccgggaactgttcgtctgccataacacactttcttctgtatggtgctgttctgttcgattattcgattgcgcaggtcaatgctgcaacaaaacttgtcaaagaatacaaaaaacgccagtcctcgatcgggtatgccggagcatgccaaatcgaatcggactggcgtgaagtatgctacttgctcttcttgccgtagcgcttctcgaagcgagcaacgcggccaccggtgtcaagaatcttctgcttgccggtgtagaacgggtggcactgagagcacacgtcaacgaacatgtgatcttccttgccagcggtgcgggtcacgaaggtgttgccgcacgagcacgtcacctcaacggggtggtaatcaggatggataccctgctgcattttacgtctcctatggattcgggggacccgggtcgtcatgcccctatggcaggacgtgaaccggaacctaagggattgtacacgcctatctggacgtgaagacgcgctgtgccgccgcaggaggcgacgcaaaagagtggggccgcaggggcttgaaccctggaccgggcgattatgagtcgcatgctctaaccgactgagctacggccccacgttcgctgcgtaaaacagccaacttgccaaagtgtagcacgagcccgctaatgccggcacgcgcgccatgcacccataccatgcacccgccagcaacaagcagcatctcccggcgctacttctcccccatgtaccccaacgggttctcgatgaaccgtcgcaagcccatttcggccgcgccatatagcgagggatgcagcgccaccggcggcacaaacacgcgaatcttcacattcgggtatcccagaatttccgaacgcagccggccttcaagcacggtggccagctcgtcgccgaagtgcgtccacagtccgcccaacagcaccgtatcgacatccaccagattcacggcggaagcgatggcggaaaccagcgcatcagcggcctgatcgaccactttggccacgtctggatcccccgcacgccaacgctggaggaatgtatcgatggcctcgctgctggtggcatccccgtcttcggcaatgccggcagcctcgaccaaggcgcgacggcccgcaaacgcctcaaggcacccgtggcgcccgcagctgcacaacggcccatccatcgccacggacagatggccgatctcgccggcgaatccgtgcgagcccatcaccacttcgccgtcacgcaccaccgcgccgccgatgccgatatcggtagacaggtaaataaaggaatccgtgcgatccaccacattcaggaaggacgcacgttcggtggcataccccggaatctgagcgatggcggccatcttcgcctcattgccggccaccacatccagccggcgtaccacgttgaaccgggtgaggttgacgttttcccaacccagattgcgggccaccaacagccacatgtcgtcggtgacgatgcccggcagcgcaagcccggctcccaccactttgcagccacgtcgtttgagtcggctttccaacgggaaggtcatcgcatcgagcttggcgaagatctcgtacgggtcagtgccggtcatatcctcactcacccactcctgaccgagagtgtcgccgttcagatcgagtgccaggcaaccgtagccatcggtgttgatctgcaggccgatgccggcgatggacccgccatgaatctccagcggcgtgctgggccgcccatatgtggtggagacgaccggctcgccttcctgcaccacgccactatcgatcagcatcgaggccaacagcgaaagcgtggccttggtcaggcccgtttccttggccaagtcggccctgctcatgggtttctccgcgcgcaacaaagtgtcgagaaccaccgacaaattatggttgcgcagatcctcctgattgatcctgcgtagacttgccataggctcctacctctttgcacccctagtctcgaacgccgcacaggcgctcacatccgtctatcgcacaatgatattgtgcgtcaaacgattgaaccagatacgcaccttcgcgtgtttccgtttgcaatcatacactgcaatacagtatagtttaatcgtctaacttattggttgtggcgcgccgaaacttgcaagcgcgaccctcatcgaggaggaatgcatgacgagagtactggttgccggcgtagatacgtcaactcaatcaacaaaggtccgcattacggacgccgccaccggcgaacaggttcggttcgggcaggccaagcacccggatggcacctcggtcaacccggaattctggtgggaggccttcaccaaggccgccgagcaggccggcgggcttgacgatgtcgcggccctcgcggttggcggccagcagcatggcatggtcattctcgacaagcagggcaacgtgattcgcgatgcgatgctctggaatgacaccagttccgccccgcaggccgccgccttgatcgacaagctcggtgcagctccggccgagggcgacgaaccggacgacgtgaccgcccgcggcaagcaacgctgggtcaaggccgtcggatcctcccccgtcgcctcctacacgctgaccaaggtggcgtgggtggccgagaacgagcctgagaacgccaagaagattgccgccgtctgtctgccgcacgattggctgagctggcgtatcgccggctatggcccggtggccgagggcgaggacgctcatctcgaagccctgttcaccgaccgttccgacgcttccggcaccatttactacgatgccgcgcatgacgagtaccgccgcgatctcatcgccatggtgctggcccctgccgagggcgaggaagccgccaaggcccacgccgacgccattgtgctgcccaccgtgctgggcccgcgtgaggcagccgccgtcaaggccgaccccgccattgccggcaaggacgttgaaggcggctgcatcatcggccccggcggcggagacaatgccatggcctcgctgggcctcggcatggccgtgggcgatgtgtccgtatcgctcggcacctccggcgtggccgcggccatcgctgaaaacccggtgtacgacctgaccggagcgatttctggctttgccgactgcaccggtcattatctgccgcttgcctgcaccatcaacggttcgcgcattctggacgccggtcgcgccgcccttggcgtggactacgacgagctggccgaactggcctttaaggccgagccgggtgccggcggcatcaccctggtgccgtacttcgacggcgagcgtacgccgaaccgtccggacgccaccgcctcgctgactggcctgaccctgcacaacaccaccaaggagaatctggcccgtgcgttcgtcgaaggcctgctgtgttcccagcgcgactgcctcgagctgattcgctcgctgggcgccgagatcaaccgcatcctgctcattggtggcggcgcgaagtccgtggccatccgcacgctggccccctcaatcctcggcatggacgtgacccgtccggccaccgacgaatacgtggccatcggcgccgcccgtcaggccgcctgggtgctgtccggcgaggccgaaccgccgacctggcagctcaccatcgagggcgtggagaccggcgagcccaccgaagccgtgtacgaggcgtacgccaaggcccgcggctgatacgctgccagcaaatccatgagataacaactgaataacgattcctgatgaatgccgccatggcgagcatcgcgaagagccgctgttataccgcgctcctcgctgaagcacacatggcggcatttttcgtttcccacgcaatccacaaatacggctataatcaagtcgtttgaacaagtctggagatgatcctatgaacgaccgctcccgtatgatgctgtacgccctgaccgccgtcgcctgcgtgatgtggatatggcagtctgtcaaagagtcgatgaacgacggcacgatcatcagcacttcgaacatcatttttctggtatgcattggcatcgcggccatctactgcgcggccaacgcgctaatcctgtggtggcgccagcccggcaaggatgacgcggctgatgacgacgaaaccgacagcacggacgccgaggccgaagccgaacaagccgaagaaaacgaacacgacgacgttgccgacaccgcagacaccgacaccgcagacgccaaagaaaaccacaacccacagcactaaaggaacatcatggatgcaaccacattgtcaataaccctcagcgcgatattggccgtcatctgcataccttgcggcctgtttctggggcttgttcccatgaaggccgacctggtgaccgccaagcagtcaaaggcctcgcagatggtgagcttcatcgttgccatagtgttcatcggcttgctggtcgcaggacatgatctggagacctgggccatggtaatcggtctggtcatcggcttcgccgttgccaagattcccgcgctgcatgcctgggctttgcacaagtggccgttcttcgagcccaagaaagcggctcccgctcccaagcgcgtcaagaaagccaagaagaagtaagctctggccttacctattcgctgaaagcgggatatcgacatcggtatcccgctttttcattggccgtacatatccgctgaggcacatcgccgaatcatattgtcgaaatacaccccaagtcagggctgatttcacgaagaacgtacaccgggatccatccatcgcgacaaacggaaaagggacgctgcgtgcaacagcgtccctttcggaggaggaatggaactcaggtccatccccgtggccaccgggcgggcccggaggccaggtttagctcagcctttctttttcttggagagcaggtcgtaggcgacggcggcgatgacgacgaggcccttgatggtcttgacccaggcggcgtccacgcccatgatggacaggccctggttgagcacgcccatgatcagggcgccgaccatggcgccggggatggtgccgatgccgccggtgacggccgtgccgccgatgaagcaggccgcgatggcgtccatctcgaactcatgccgggcctgtctcgttaagtgtgtaactggcgttttcattgttgtgttccctcgcttggccagcggtcggcgaaggtgatggcaaaggcgttgagcgcgggcttccagcgcgcgctccatcgtatccgtcccttgccggtggggtccagcgagcggacggtcaggtacatgcacttgagcgcggcctgctcgtcggggaagtggccgcgggcgcggatggagcgcttgaatctcgcgttgagcgattcgatggcgttggtcgtgcagatcacgcgccggatctccacgtcatagtccaggaacggtatgaaccgttcccacgcgtccatccacagcctgcggatcgcgggatatctcgcctcccacttgtccagcatcgcgtcgcgggccgccgccgcggcggcggcgctcggcgcggtgtagatgggtttgacatcgcgtttgatggcgtcccagtccttcttcgacgcgtggcggaacgtgttgcgcagcagatgcaccacgcaggtctgcacgatggccagaggccataccgcgcccaccgcgtcgggcaggcctttgagcccgtcgcagatcaggaagaacacatcgtccacgccccggttcttcagctcggtgagcaccgacagccaatagcgtgcgccctccgcggcgggcgacgcccagatgcccagcacgtcgcggccgccctccagatccacgccaacggccacgtagaacgcgcggttggcgacctgcccgtcgcgcaccttgacgacggtcgcgtcgatgaacacggccgcgtacacacgatccaggggacgcgagcaccattcgtccttctcggccacgacccgctcggtgatgcgactgacggtctccctggacacgtccgccccgtagatctcctggaagtgggcgctgatctcgccggtggtcaggcccctggcatacagggacagcaccacctcgtccaccccgggcagccgccgctgccgtttcctgacgacgaccggctcgaacgagccatcgcggtctcgcggcacctcgatcctgaccggacctaccgaatcggtgaccacggtcttggcggtggtgccgttgcgcgtgttcgcggccctgccgtccttggatttcttgtgcttggcgcggcccaggtgctcggccatctcctcgtccagggccgtctccagcacgcttttggtgaactgtttgggcagtccgtcgggccctgtcaggtccagtcctttttccttggccatgcgcacgaatgtgagcgccgcctcccgctcggcgttgcgtttttccgcgtccggcttcttcgtcggtgtcatgtttcccattgtcccagcagacatcgtccaccagcctttccgaccggccacacgaccggccagttaaggccagttacacacttcgagagacagtcccgttttcagcggaaggagagaaaggagaaagaaggaatggaaaggtgccatgcgggcataacacaacaccgcacatggcgaaactatcgaatcagcccatcgggcgcactggcatcataattgatgtgtacacgcccgatggagcgaattcaatcggtcagaccgatggtcactcgacatcagccagggcatcaatgatgtagttgttgatggtggccttgacggactcgaggtgatcggacttggtggcggcgatgagctcggactgcggcttgtcgaggctgtaggcttcgaggtcggccaaggtgacgttgccctcgtcgatgtccttgccgatgccggagtcgtaggagctgtagcgctcggcctgaagattctggatgaagccgtcctggttcatcttgtcggcaaccagcaggccggcggcgtaggcatccatgccggcgatgtgggagcggaacaggtcctcctcgtagaaggaggtacggcgcggcttggcgtcgaagttcagaccaccgtgaggtccgatggagccggcctgcaggacttcccacatgacggcgacggtctcgtacagatcggtcgggaactcgtccatatcccagccgatgagcttgtcgccctggttggcgtcgagggaaccgaggaagccggactcgcgggccacgcggatctcgtgctggtaggtgtggccggccaggttggcgtggttgccttccaagttcagcttgaagacgtcggtcaggtcgtggttgcgcaggaactcgatggcggtggcggcatcgaagtcgtactggtgcagcgtcggctccttcggcttcggctcgatcaggaactgggcctcaaagccgatttccttggcgtaatctgcgcacatgtggaagaacttggcgatgtggtcggtctcgcgcttcatctcggtgttccacaggttctcgtagccttcgcggccaccccagaacacgtagttctcggcgcccaggcgcttgccgatctccaagctcttcttgagctggccaccggcgtaggcgtagatgtcggcgaacggagaagtggcggcgccggacacgaagcgcgggttggtgaacagggaggaggtgttccacagcagcttgacaccggtggacttcatattctcgtcgatcttgtcaacgaccttgtcgaggttggcgttggtctcgcgcagggtgtcgccttcgggggcgatgtcacgatcgtggaagcagaagtactcgacgcccagcttctgaaacagctcgaaggcgtagtcgaccttggccagagcctggtccatcggatcggtgtacttgtagtacgggcggtgcgcggtgccggtgccgaacggatcaaccagttcctggttgaaggtgtgccaccaagcaacgccgaagcgcagccaatccttcatcttcttgccggcaacgaccttgtcggcatcgtagtaatggaaggcgaagttttccttcggtcctttggcgcggccgacgtactcgatcttgtcaacatcccacagacccatttgggcgctcctttgcagtaggcgatattacggattgcaggaccaataataaaacgaacgaactaagtttgtcaaatgattgaattaatacgccgcgtctcagcgtgttgctagtcattgcaatggttttcgaatgcagtcaaggcacagatagtatgggcaagccaagaaagacaactcagccaaggaaacgagacttgataattgacgtcacgcaattcctcgccggccaccgctgaggccggctccaccaccccgccaactccaacagcaccacccccgccaacaccaccgccatggtcatcaccctgatgatcggctcgtttgtggccatcctcaaccaaacgctgatgatctccgccctgcccacgttgatgcacgagttcgacgtgcccagcagcaccgtgcaatggctgaccaccggattcatgcttaccaacggcatcatgatcccgatcaccgcgttcctcatcgagaccttcaccacccgccagctgttcctgtacgcgatgggcatatttgcagaatgatcttggcgttaatgcactggtgtccggtctggtgatgatgccgagcggcatcgccatgggcatcctgaacccggtggcaggcaagatgtatgaccgtatcggtggccggccgctcgccttactgggcttcgcgatcatgacgtctgcggctgtgctgctggtcaccatcatgaacacgcacaccgcggcggccatgcgcaccggagtgccggaagcggcggcatcggccattggcgtgcgggcttcgttccgcacggtcgccattgtgtgcgcggtctgtttggttgcgtcactcttcattcgtgatcgcggccgccgacttggacagcagcgttaggcgaatccttcaccgattgctggccttcttgatcagcgcgtccaaagtaccggcttggcgcgcggcttccacatcttcccagtcgagaccggtgtctttggccctcccgtagaaaaaccgcaccagaccggcaaagtccggtttatatccggtttcccggaatgaacgggccagcgaatcaccgatttgcgggtcatcaggccttcgtgcctcatagatcgggatggaacaggatcgccacacgcctctcacatgtgcgatgcgattgacgatcatgccgccgtgcgcaccatcgtattgcgaggcggcatgtacgtccgccacctcgtagacaccaccatgaatgatgtcctcaactgtcagacgacctttgaccgcgctggcatcgcgaatccagaacatcgaagcgaaattggtgtcatcaagttcgcgaaaatcacgtatctcgcgtgtgccgatacgttcgtccttgtcatacatgaattcggccaaggctaggaatggcgagatacctgcgcccggaccgtactgcaattcgatacgtaaatcttcggattcattgccggtcagtccaataccgctgacggcgcagtcataggcaaaccaatcccagaaccaccattcgatcctttgtagcacctgcttcggatactttttgcatgggttcagattcacttcgcgataatatatgcgtctcgcttcggcatagacggcgagattgcagcgtttgaacatctcggctacgtctttggtgtccagcattgctggcaaaccggcattttcggcagtagtagtgattgcggtgctcatggtgtttccccttcatgtgatgtggacggcgggctacgttgcccgccgtgaggcacactgtatgacgttcgtgcggtggctcgcaagcccacatggcgagatggtggataagtggaaaacccaatgattccaaggggtatggaatgtgcataacagtggctaccgtcggtggataaccgcactttcttgcaggttatccactgatcgcgcagctgttatccaccgtctctgggttatccacatcgtctctggcgtgtcgtccactgtcagcagtcgatttctgcttcgtttggcgtgtataagtgcacggtgaagtgtataactccgcgcattaggcatatttgctactgagaaaggtcccgaaatcgccttcgaacgcatagctacactcagcagatgtattcagcatggcaatagacccacttaggcaccggcgaatgattttccctcgcttatagagtcggcaaaggcccaacacctgtcccaacgccgacgctactgcactggcagcgtcggcagaggaccacaacttggcacagcaacgacgctaaaaccgcccagcatcgttacacgtccaagttttggccgctaacgacgcttaatgaacgcttagcgtcggcagcaggtcacgcactggttctccaccgacggtaacgctccttagcgaagccagcccgccactctttggcacatcaccgacgctgagagaacctccagcgaagccaacctgccaaccgctggcaacatgacaccacccacacccctcagcgaagccaacctgccagcgcatggcaccccaacaccgatgagaacacccaccccaccagtgcacaaaaaggctggtcatagcggttgcgatgtaatcgcatcgtaatcgcgatgaccagcctcgggagttgggctgcaatgagcaccgatatgaatcagatgatgatgccgttgcagtgatcgacttcgtgctggatgatctgcgcggtccagccggcgaaggtggcgtggcgggcgcggaaccgacggtcctcgtagttgacctcaatacgtcgataacgcagtgtgcggcgttcgccggtcagggacaggcatccttcctgggtatcgaaggcaccgtccgaagcggtaatcacggggttgagcatcaccgttatgcgcccgccaaggtcttcatccacaaagacgatgatgcgtttgcctacgccaatcatgttggcggccatgcccacgcaccgtgaacggttggcctccagcgtgtctacgaggtcttcgatcacctgctcgtcgccgggcccagccgcttcagacggcgtgcgcaaaaacgaccgcgaagtcataatagggcgttgcatgttggaatcacgcttcttcgtgccaatgggggttctggccgaaggtgtgaccttcggggttgtccattgcggcgatatcggccatgtcctgatcatcgagttcaaaagcggtcaggtcgaggttctgacgctggcgctccgggttcaaggacttcgggatggccacgtcgccgtactggaggtgccagcgcaaaatggcctgaaccacggaaataccgtgcttggcggcgatacgcttcaggtccgggtcgcgcagcatctggttggcgcggcccagcgggctccatgcctcggtgatgatgccgtgcgcgttgtcgtaggccagctgttcgcgctgctggaaatacgggtgcagctcgacctggttgacggccggggtcacgcccgtatcgcgaatgagcagatcaatatggccgggcaagaagttgctgacgccgatatgcttgaccagcccacgttcacgggcttcgaccagcgcctcccatgcctcaacaaactgaccctggctcgggttcggccaatgaatcaggtagaggtcgatgtagtcgagtcccatacggcacacgctctcctcgatggtgagcagcgcctcgtcatgggcgtggtggcggccgggcagcttggacgtgacgatgatgtcttcgcgcggcacaccggattcgcggatagcgcggcccaccacgccctcgttctcataattgaaggcggaatcgatgagtcggtagccctgatgaatggcggacttgatggcgtccacgccggccaggccgttgaccttgtaggtgccgaatccggtgggtggcagttcgaggccgtcgttggccttgcggatcggagtgaccggtggttcaagcatgatagttctcctgcttctcctgtgatggcatatctgttccatcataaagccaaccaatccgctgcgggcatactatttgacttcccccatttccggcgggtggtgagccactgcaccaccgaggcgccgatggagaactcctccatcggcgtggagtaggcgatgttcagtgacgtttccgataggatgccgaggaaggtcaggatcgcgagcgagacgaccgcgatgacgagtttgttggagaccggttgcttgccgccgttaggcagctgtgttgcggaatgagtcacgatcttgttctctcctccattcattcagatattctgactacgacgttggaagtcttcctgcatgagtcgcagagcctcggtcaaggtgcgtaccgtggtttcgcactggtccgaggtcaatccgcccagcagttggctcaaatgcgcgtgatattcctccacatagatacggcggatatccaagccgcgttcggtgagcgtgagcgtcaccgcacgccgatcggcggcatcggcgtgtttgacgacgagtccgaggtcggccatttcgccgacgagcttggtgatgctcggcgtagtgacgccgaggaatgcgctgacgtcgcccacgcgcgcggtgccggtatcttgcccattcggttcgttgatatgccagacggcgtcgatcacgtggacatagcgcggtttcatacctttcggcaatgccggcatcagttcggtgatggtcttggccttccagcagacatccaggaggctccgcacctcattcaccggaagcaagccggtcttggtatcggttcgggaatcgcacatcgctggcccaacctccaattagttaccaatagtcattaccataagtaactatatgcaggctctagacaaacccaacggcctgcgcgcccgtgtcgagttccgtttcgacataaaaaagccagggaatccctggcttgcaatgcacatatcgctgcagatttgccgggacctatatgtccccggcaacaacagccgtatatacgctaccgatcagtgctgccctcatcatccttggcacctgccgtggcggcctcagtctccttggcgttccacccggcgacggcattccaaccactccatccgatgaccactagcaagcacagcgagaagacaatagtggcccaattgaacagcgagccatcgttattggcctcgaccagtgactgccagagccagataacgcaggccaagcaggtcaatgcatacatacgggaggtggagcgcgcggtgagtttcatggcggaaaaagtcctttgattacaagaatgacggcagataacagtgtgggatccgcaccagcggcaccggcacgaatcccacatcgaggaggagaaaggggaaggtcagctcttcttgcgcttggacatgatgtccacggcgacggccagcaggagcacgaggcccttgatggtcttcaccacggcggtgtcaacacccatgatcgacagaccctggttgataacacccatcacgaatgcaccgatcacagcgcccgggatggtaccaataccaccggtaacggccgtgccaccgatgaagcaggcggcgatggcgtccatctcgaactccataccggcctgagcagttgcggaagccagacgggagagcatgcagacagcggccactgcggacaggaagcccatgtggacgaacagcaggaagtccacgcggcgggtgttgataccggagaggatggcggccttgcggttgccaccaacggcgtacacgtggcgaccgaacacggtcttggtcaggatgaagttgtagatgaagaccagcacaccgacgatcaccagcataatcggggtaccaccctgatcagcgttaccggaggaagccagcaggtaggtgacgaaggcgatgacgaccgcggcaagcacaattttgaggacggtcaggctcatcggctcgggcaccaggccgaccttggccacacgggcgcgcttgcgcagctggctccaggcaaagccgacgatgcacaggatgccgagtacaatggtcagaccatcgaacggaccccaccagccaaggatgttgggcaggtagttacgggcaatgccacggaattcgagggaggtaatcggcacggattcgccgacgatcacggtggcgagaccacggaagatcaacatgccggccagagtggtaatgaagcccgggatgccgatgacggcgacccagaagccctgccagacgccgacgatcaggccgacgaccagagcgatgacgatggcgagcatccagttgactccggcgcgttccatcagcagtgcacacacaccaccgatgaaggctaccaaggaaccaaccgaaaggtcgatgtgggtggcgatgatgaccatcaccataccaatggccaggatgatcacgtaagcgttctgctgaatcagggacacgaaggagttcggcttcagcagcacgcctccggtcaggacctcgaaggccacgacgatgaccagcagtgcgccgacaataccgtattgacgggcattgttggcaaccgtggccagcaggccggtcttttcttctttctttgcaggtgttgcagttgcggcgctcatcaggctgccacctccctttccttggtcatacccttcatcaggtattcctgggtaaatccattcttctcaacattgtcggtgacgacaccgtaggacaccgtgtaaatgcggtcacagataccgatgagctcgggcagctcggaggaaatcacgatgacggccttgcctgcatcggcaagcttatcgatgatttcgtagatctcatacttggcgccgacgtcgatgcctcgggtcggctcatcgaggatgaggatgtccggctgcgagataacccacttggcgagcagcactttctgctggttaccaccggagagggtggagacattcacatcgatgtcatggcacttgatgttgaagtccttgcggtactgttcaacttccttgcgctcaaggttgtcgtccacaaccccgcccttgctgatcttggtcagggaggccagggacgcgttctctcggatgttctgcagcaggttcagaccgttgcccttacgatcctcggtggcgtaggcgagacctgcgtcaatcgcggactgcacgttgggcatcttgacttccttgcccttgacgaacaccttgccggagatgttggaaccgtaagagtggccgaagatggacatggccatctcggtacgacccgcacccatcagacccgccagaccgacgatctcgccggcatgcacgttgatgttcgcatggtctacgatcacgcgctccgcgtcgagcggatgatgcacggtccaatcctcgacacgcaggtattcctcgcccggggtattggaggggtggttcgggtacaggttgtgcagcggacgacccaccatcttgcggatgagttcttcctggtcgagcggcgtctccggcgtcacgtacatcacaccgacggtcgaaccgtctcgaatgatggtgacattgtcggcgatggcggcgacctcgttgagtttatgagtgatgatgatgctggtcacgccctgctcgtcacgtagctgacgaaccaggtcaagcaggtgggcggaatcctcatcgttcagtgcagcggtcggctcatcgaggatgagcagcttcacgtccttggacaatgccttggcgatttcgacgagctgctgcttgccgacgccgatgtccataaccttggtatccgggtcttcgggaagtcccacacgatcgagcagcttcttcgcctcggcacgggtcttgtcccagtcgattacgccacccttggcctgctcgttgccgatgaagatgttctccgcaatggacaggaacgggctcaacgccagttcctgatgaatgattacgatgccgtcggcctcggaatcattaatagtatggtatttgcattccttgccatcaaaggtgattttgccggaatagctaccgtatgggtacacacccgaaagcacgttcatcagggtcgatttacctgcaccgttctcgccgcagatggcgtggatctcgccgcgatcgacggaaagattcacatcggtgagggctttgaccggaccgaacgtcttcgtgatgttttccatcgtcaagatggtgtcatttgatgacatgtcaccactcctcgtcacagttctgtgttcatggacatgcggcgcatatcggctatgcgccgcatgtcattgtgtttgtttacggattgcctgatgaggactacttagtcagctcgtcgaagcgatcctgggtgatgtagttggccgtgaccagatcctggaggttgtccttggtgatgttctgggggtcaagcagcttggacgggacgtcgatgttgttgttgttgaacttgccgttcaggccggagacttccttgccctcggcgatctcgacgaccatgtcgtacacggcgtcagccagcttgttcacgtccttgaacacggtctcgccctgcttatccttggcgatgttggcaactgcgatctccatggcgtcctgaccggtgatatacggccaggagtcggtgcccggcttcatgtcgggacgcttggattcgatggcgttgatcacaccctgggcgatgccgtcgtacggagtgaggaccgcgtcgagcttctcgccgtgggcgtaggtggagtcaaggatggattccatgtccttctgcgcctgctcggtcttccagctcatcacggagatcttctgccaatcctcaacggtgaagtccttggtcacgccaccctgaccgtgctgggacggggagacgagcacgcccttctcgaagtacggctgcagcagatcccaagcgcccttgaagaagtacttggcgttgttgtcatccggggaaccggtgaacagctcgatattgaacgggccggtggcgccatccttaagcttgagctggtcaatgagccacgtggcctcgagcacgccgacctgctccagctggaaggtggcgtagtagtcgacggcgtcggtgttcatgatcagtcgatcgtaggcgatgaccttggcgcctgcatcgcgggccttctcaacggcggggcccactgcggtgccatccttggaggcgaccacgacgatcttggcgtcgttgttgaccatgttctcgatgtcagcgttctgctgggccggcttatcgtcggcgaaagacaggatgaccttgtatccggccttctccagcttggccttcaggttgttgccgtccttgttccaacgctcttcggacttggtcggcatcgaaatgccgatagtggcacccttttcgatcttggcatcaccgccagttgcctggccgctacggctgccaccacaggccgcgaggcccgcgcacatggcaacgcctgccaccacggcgacgatcttcttagtgaacttcatttgttctccttcatcttcgaggggatggcgaaccctccttggtcgcccgaacctgggaataacctcaggttcatctcatagaataccgtattgagttaagttgtccccgatgtctatttagaagtgcaacacccttgttggtcctgtaattctaacagttcgtcggcgaacgcctcggcgggcgtccggtagccgagcacgcgcatggggcggttgttgatctcgtcgacgatctccctgacctcctttgccatgtccatccggatctcgcagcgtttgggcagataccggcggatcatgccgttgcggttctcgttgcttccccgctgccagctggagtacgggtcggcgaagtacgtggccatgcccagcccgtcgcgcagcctttcgtggtgggcgaactcggtgccgttgtcgtgcgtgacgctgacgcgcgcgccggccggcagcggcgagaacatgtccagctgcgccccgacgctctcgccggcggtcttgtccggaacgacgcgggccatgaggaacctggtcctcctctccacctcggtgtgcaggttgcatcccactccgatgacgctgtcggcctcccaatggccgaacgcgctcctgccgtcggcctccggcgggcgttcggagatgggcactcggccgggaatcgggaagcgcgacgtcctcctgccgccgtgcctgcggcgccgcctgtgccctcgcggcaggcaccgcgcccagcgttcccgaagcggcctgctggagtagacccatcggtagatggtctccgggcacacgcgcatgagcgcatcgtccggccacaggacgcgcagcctgccgctgataagcagcggcgaccagccgcggcccagccattcggccacctgcgcccacaggcggtcgtgcgacagccggtagggctttcgtggcttggatctcctgcggtcggccttgcgctgcgcgggcccggcgatgtagtagcggccggtccatggccccgccttcagtcttttcggccggtacgggcggtacgactcgttctcgttggacgggaaccatgtgttgcgcttgatctcccggctgatgctggacgggctgcggcccagcatcgcgccgatcccgcgtatgctggcgccgttgcctacctcgatctggatgacctggcgttcctcttccgacaggtgcgaatatacttctcccataggtgcgacatcccttcggactggttttctaggcaatttccaatctaacgggtgttgcactttcatttagacaacggggtcaaactcaagaaagcgaatttcctgtcgtttatgttcaaccaatgaacgcaatggcgatttttcgcgcatcacaaggcgacacgccgaaaaatccacgctctgcgcctcgctgtgcctcatgccggtaacgactacactgaactcttatggcaacaaggcttttcggttcgcagacctcgcttcgcgaggcaaaccgcgccaacttgctggccagcatccacaagttcggcgccatgacacaggtcgaactggcagaggtgacaggactgtccactgcgaccgtgtccacgctcgtccatcagcttgtcgacgaagaccagctggagatcaaaaacaccgttcgcaacggtcgcagagccactctggtgacccttgcacggcatcagggcctcggcgtcgggctttggatcgcgcgacgtcatcttacgctttctatcgttgacttctcgaagtcaatcatcgctgagcacacgctccccctgccgttgggccacaaggcggacacaacgctggaacgcgccatgctgctcatcaatgagaccctgagcagcatcgacgccgaagccagcgagctggtcggcatcggcgtggccgtggccgcaccggtggccaccagcgaccacaccatagcgattcccggcattctgcccggatgggacggcgtcgatatcacggccccgttgcgcacggcgttcaacgttcccgtatacgtcgataatgacgcgaatttcgcggcatacggcgaatcccgtatgggcgtggcggcaggcaaacgcaatttcgtatatatctcagccaacgacggggttggcgcaggcatcgtcatcaacggcgaaatcatgcatggcgtgaccggcctggccggtgaaatcggccatatccaggtcgacccgctgggtgccatctgttcgtgcggcaaccgcggctgccttgacaccgtcgtggcggaaaacaggctggtgcagttgctcagcgtcacacacggcaatatgacgctggatgatctggtgtcctttgccaacgaaggcgaccccggttgccgtcgcatcatcgccgacacggccgtgcgtatcggtcaggtggcggctgatctgtgcatcagcgtggatccggaggtcattgtgctcggcggcaagctggccatgaccggcgacgtattcatccaaccgttcaatgaagcgttgcagcgcatgctgttccctgatgccgtggcacccatcgatgtacttgtgtcatcccacccgaacgacaactgcgcgctaggcggcgcattatgcgccatcgagttctcggttcgcaatgacgtcagccagtgaccggtaccaggagaagagtgagaagaaggaacacaccatgaggaattcgagcacacctcctctgctgcggctggaggacatctgtgtgaagttcggcttcgtcgaggcgttgaaatcggtgaatctgtccatccagcgccaggaggtcatcgccatcgtgggcgataacggcgcaggaaagtccactctgatcaaggtcatcgcgggatttctgcagccgggattcggccatatttatctcaacggcgaacaggtgaccattccctcgatcagggaggcggaccgcatgggcatcgcatcggtgttccaggggcaggagttctgcgacaacctggacgtggcctcgaacctgttcctcggcaaggagatcaatcagattggcatacgcgatgacgattcgatgaactcgcgtgcccgttccgtgctgaagaccctgagctcggcgattcgggtcggctcccctatcgcatccttatccgtcggccagcgccagaccgtggccatagcgcgcacgctgctcaatgacccgcagcttattctgctggacgaaccgaccaccgcactgtcggtgatgcagtcggcggaagtgctcgcatatatcaagagactgcgctccgaaggccggtccgtggtgatggtctgccacgatctgccggatgtgttcgcggtatccgaccgcattgtcgtgatacgtcaggggcacgtcaccggcgtgcatcgaaccgtcgaaacgtcctatgaggagattatcgccgaaatcgccggcgtgaccaccgaacacgagtacgaggaaatcgctgagaacccggaattcgattccatggtcaggcagcggaaactcatcgaccgcactatcagcgcggcagtgagccatggcaccggccatgactcaccattagactaacgtcccgttgccggagcgacatcgtcagcgcagagccaggttggccgcgccgatcagaccggcatcctggccggcggtggcggcgacgatcttggcatggccgcggtaggcgctgccttccaggaaacgctggtagttgtagcgggccggctccagcaggatgtcgcccacggccaccacgccgccgccgatcacgaacaggtccgggtcaagcacggcggaaacggcggccatggtgcggcccagccattcgccgatcttgccgaacgcatacaggccaagtacgtcaccttcctgagccgcttgggacaccatcggcccctccagtttggtgatgtcgccgccgcacagttccagaagacgcttggcgtcctgaggacgacggcgcacggcggacttggcgaagttctccagcgaagtgcccgaggtgtagcgctcggcgcagccgcgcaggccgcagccgcagtggtcgccgtccgggaccatcggcaggtggccgagctcggcggccatgccgaaggagccgcggtagagctggccgttgatcacgatggcaccgccgaggccggtgcccacggtcagcgcgaccatgttggagctaccctggccggcgccgtgcacgaattcgccccagccggcgcagttggcgtcgttttcgacgatgaccggcacggcatggtcgatcagcgcgccgacgtgctcggacagatcgtagttgatccatgccggaatgttggcggagaaggtgagcgtcttgcgatccgcgctcacattgccggcggcggagatgccgacggcctcgatatcggtgtgcccggcggccacagcctcgcggtacacctcggcgatgtgctggttgatggcgtcggcatccatcggcgtggggacgcgccagcgctggatgatgctatcgttttcatcgcagacggcggcggcgatcttagttcctccgatatcaatggcgagcgtggtcatggcttactccttgaaggcttgtgtggcgtacgagacagcgaaaatagtaacgagttgccatgacctcccatagcgtatttttcatgatttgtcatatctcgcgcacgttctgccaatgtgaccctgcacacgtttttcaccatttataagcactgttaacgctaacgttgtcattcaatagcaaacgttgtcattcagactatcggcgtgtcgagcagagccccaaggccagcacgaaaccttcggtatttccatgcgatacggcatcggcatcgactgaaacagcttccatgccagagtcgaatggccatcaaacgactaaacaccagacacacattttggcctataaccccatatttcgccctacaccacgaaatacggcaaaagaacaaaaaagctcctgacatttgtcaggagcttggtggcgaccccggccggacttgaaccggtgacctccgccgtgacagggcggcgctctaaccaactgagctacggggccatctgtacctcaatgaagcacaagaggatatactacagcatcactggaccacggcgcgccgcccggcgcgtcgcgccacggcaatgtcaggcccatccattacccctccaagccatagcgacgcccgccattccagcccttccgataccatggtgggcggtggtttggcgtggattcgatcgttatgcggacagggcggcacaggcctgacgcggcgcaccgcgatccgtgattcggggggcgtgctccgcgctgcacacagcgtatccatcacaaactaaagactaaagaaacagcggaatttcaacccctttttaaggagtaactgcacaacatggcagaattcgtatttcagatgatcaaggcccgcaagtcttacggcgaccgcgtgattctcgatgacgtgaccctgagcttcctgcccggcgcaaagatcggcgtcgtgggcccgaacggcatgggtaagtccaccctgctcaagatcatggccggcctggagaccgtgagcaacggcgaggccagcctgaccccgggcttcacggtcggcatcctgcagcaggagccgccgctggacgacaccaagaccgtgggcgagaacatcaagatggcgttcggcccgattgccgagaaggtcgcccgattcaatgagatcggtgaggagatggccaatccggacgccgacttcgacgccctgatggaagagatgggcaagctgcagaccgagatcgacgccgccgacggctgggacctcgactcccagcttgagcaggcgatggacgccctgcagtgcccggacccggataccccggtcaacgtgtgctccggtggcgagcgccgccgtgtggccctgtgcaagctgctgctcgaggccccggacctgctgctgctcgacgagcccaccaaccacctggacgccgagtccatcctgtggctggaacagttcctgcaccagtacaagggcgccgtcatcgccgtcacccacgatcgttacttcatggacaatgtggccgaatggatctgcgaggtcgaccgcggccacctgtacccgtacaagggcaactactccacctacttggagaccaaggccaagcgtctggagatccagggcgccaaggacgccaagctcgccaagcgactgaagaacgagctcgactgggtgcgctcctcgcccaaagcccgtcaggccaagaacaaggcccgtctggaacgttacgaccagatggagaacgaggcacgcaacaacaagaagctcgacttctccgagatccagatcccggccggcccgcgcctgggctccaccgtgctggaagccaaccacatccacaaggctttcggcgatcgcgtgctcatcgacgacctgtccttcacgctgccgcgcaacggcatcgtcggcgtgatcggcccgaacggcgtgggtaagtccacgctgttcaagaccatcgtgggcctggaaccgctgaccagcggtgaactgaagatcggcgacaccgtcaaaatcagctacgtggaccagaaccgtgaaggcctggacccgaacaagaacctgtgggaagccgtgtccggcggcctcgacttcatcgaggtggccggtgtggaggtgccgacccgcgcctacgtggccagcttcggcttcaagggcgccgaccagcagaagctgaccggcgtgctctccggtggtgagcgcaaccgtctgaacctggccctgaccctgaagcagggcggcaacctgctgctgctcgacgagcccaccaacgatctggacgtcgagaccctggaatccctcgaaaacgcactgctcgaattccctggctgcgctgtggtgatctcccacgaccgttggttcctcgaccgcgtcgccacgcatatcctcgcgtgggaaggcgacgacgacaacccggccaagtggtactggttcgaaggcaacttccaggcctaccaggagaacaaggtggcccgactcggtgaagatgcggcccgcccgcaccgcctgcacaagaagcttgtgcgcggctgagatacgccggcattagtgccacaacgcgctttatacgtcgaaagccgtccctcaggggcggctttccccataattgcccccatgactgccccgccccgcatcccataaaatcccacagtcgcctacggcaacacaccggcagcgcagcagcaacgtagcggcaatgcgccgcataacccaccgtttaccttccaaacagtctcgttacatttcgctcccggaactcttaacccccaccggatagactgccaaccataggttggaatacgataaccgaatactgaacacagcagaacaagaatcgaggaacgccatggctcaggcaaccaccgtaactccattggaccatctggtgaaggtgctgaagttgggcgagccttccgcttaccgcaatcacacatatatcaatggcgagagtatgtacttccccaccggccgcgtctacggtggccaggtcatcgcccagtcggtgatcgccgcgtccaaaacagtgggcccttcacgcctgccgcattcggtacatggctatttcattgccgccggcgatattcgtcaagacctgttgtttgacgtcgagaaccttcgcgacggccgctcgttctccgctcgtcgggtcaacgtcacccaagccgaggggtcgattctcacggccatcgcctctttccaggagaccggccaagagggtgtggaatttgccgatccgatgccggaaaacctgcccgatcccgaaacgttgacttccgccaaagaactcatgcagccgttcgccgagaagtcgccgttcgccaattactatgccgagaaatcgccgttcgatatccgccacgtgacgccgaccgtgatgctgcgcgcggacaaggattccgccgagcatgattccggcaagcagatggtgtggatgaaggccgatggccacgtcgatgtgccgcaggtcatgcatcgtgcgatgctggcgcttggctgcgatcaggtgatgatggagccggtgctgcgccgcgccggactgtcgatttccacaccgggcatttcctatgcgtccatcgaccattcgatgtggtggtatcaggatatcgatatcaacgaatggcatttgtatgtgcaggatacgcctatcgccgcgcacggacgcggactcggcattgccaaagtgtatgcgcagaatggcgacttggtggcggccatcgctcaggaagctatggtgcgcgtgccgtaggaatagtcacccctaccgcttgtaggcttgggctatgtcgctacggcgcttggcttccctgattttcgggttttcggggccttcgttcggcggtagctggcacaaccattcgccgataatgccgatgatcatgtcggcgatgcacaccacggccgcaattgcgcactcggtgacggcgtgtgcatagaaatccgcctcgatatggctcaagctcaccacaatctgaccgccataccagccggcgagcgttgcgcccgccaatcccagtgcctttgccaacaccagcgtatacaccgcgatagtgggattgatgaagctatgcggacgtttcttggggtcggtattcgcgtatttatgcacttgcagggccaagatcagcacaataacgcccagtacggccagcaatccgggcacaatccaaggcgcaccaatcagcgacagtcccgagctttcgccgtaggaggccagaccgatacccgccaacaggcccaacacggcaccgatcacatactgccaccatggtgttcgccgtgttttcatgtccggcctccttatcgttgcgttgctgtttgctgtttgcgaacggccttcgcgctttggccgttcatcttgatttgttttttcgtcattgccgtgcctggctgctcgaggccggagactggtccgtcaccgtctggtttctagcctaccgttcgtaactggttccgccatcagctcaactattcgacagtatccagttgtccgatagcaatccgacctgtccggcatccggtgccatggccaaaaggaaggccaccgggtcgccgcccagagaagcattcgggtccatatccagccaaggtgccaataccgacgcatggttacgggccgacggccaaggaatgctgcagttgggctcgtcggaagtcacgccttccatgtcaacaaggtcaaggtcgactgccaggtcatgaacgctttcgatgctgcccaatacggcaatcaggtcggcgggcggcaacttggtttcgatttggatgaccgcgctcatcgcgtccggactgtcgaaatggctgacatggtagagcggcgagatgccctgtacctgattgccaggaacactgtcgatggaaacgatggtttcgcggaacagccgttcggcatcctgcgaggtggaatccagcgaaataatcgccttgcgtgagacgggttccgactccgacgctgattcttgcttgactgcatgcccgccgagcatccagtcttcgctctcgagctgcacggcgttacggtccggcgcggcggccagcaaatcggctacaggcccctcatgggctccagcaagtttggcgttcggattcagcgccgcccagggagccagcacaaatgcgcgctgccaagcacgcggatggggcaatgccagatccggatccgcgctggtgatgccatcaaagtcgataatgtccaagtccaacggcctggaatcccaatgattctcacgaattcgcccatggttcgcttcgatgttttgcaacgcggcgagcaattcgtggctgcccattgtggttccaagctccaccacggcgttcaggaaatccggcgtaccgtcagccatgccccacgcggccgtgcggtaaagcggcgaaataccggtcacctgtgtgccaagcagcgcgtcaatctcccgaacggcggctcgcaaggtggattccacctcgcccacattgccccccaaggccaccaccgcgttatggatggcatgcttttcagcagtgcgtccattatcggtggcacgcacgcgcgagatggagaccgatacatctgcaaaagccacgacgatgggcgcgtgaggcttgtgcacggtgacgtcgatggaggcgacggccggcgcatcggcaagaatcttatccgcgatacgttgggccagacgctcgatcaggtccacatgagggccttcgatgacagccacgatatccttggccacgcggccgtaatcgatggtgtcattgagatcgtcggattggccggcggcggccagatcaaggtgcagggtgacgtccacgacgaaggtttgtggccgttcgtgttcaaaggtgagcacaccgtgggtgccgttggcatgtacgccggtaagtgtgatggtgtccattggtaaggctttctgttcaaatgctccccctcagtcgccttcggcgccagctcccctcgcccgaggggagccaagacctagaagcaaccaaaaacagggagccaggggaatcatgcgtattcgcgccaggtgttgccggcgatgacggcggcgcggcttttggccacatcgtgtacgcgcacggcccatgcgccgtgctcggcggacagggcggacaaggctgcggtcacgtcatcgcgctgggccatggtcgggccatcagcaccggcagtacccgccccggtaagcatcgccgaaatgaagcgcttgcgggactggccaatcagcaccggatatccagtggcgcggaaggtctcgagcccggtcagcagcggtaggttatgctcgatgccgggcttggagaagcccagaccaggatcgatgataatgcgctcaggctttacgccggcggccagcacgccgtcgacttggcgcatgagttcgtcgtgcacgtcggtcaatacgccatgctcgtatacggaggtgtcttgatcggggttcgcgcccttggagccgacgagccagccgcgccaatgctgcacgacgtacaggcagtcgtggtcggcgaccacatgcggcagctcggcgtccagcgtgccgccggaaacatcgttgatgatctgtgcgccctcgctcagcgcggcggcggccacggatgcgcgcgtggtgtcgatggacagtacggcaccggccggaatcaacgtcttgacggcaccggtgatacgggccagttcgtcggcctcggacacgcgcttggcaccggggcgcgtggattcggcgccgatgtcgatgatatccgcgccggcggccatcatgtcgcgcccgtgctgggccgccttggccgggtccagccacaggccgccgtccgagaccgagtcctcggtgatgttgagcacacccatcaccatggtgtgcgtggcgtcatgcaacgcctgcaaatcagtcataggtcatctccccttcattgtttccccttcgctcccctcagtcacctacggcgacagctcccctcagagaggggagcctaggttgcgtcacttgtcaagaatcagactcatggcttcggctcgggtggcggggttgcgtagcagaccgcgcaccgcagaggtcaccgtgcgggcggaagacttcttgatgccacgcatcgacatgcacaggtgctcacattcggtcaccacaatcacaccacgtgcgcccgcatactcgaccagcgcgtcggcgatctgctgggtcaaacgctcctgcacctgcggccggcgagcatacacctcaaccagtcgggcgagcttgctcagccccatcaccccatccttggcgggaatgtagcccacatgggccacgccatggaaaggcagcaggtgatgctcgcacaccgaatacagttcgatgtccttgaccagcaccagctcgtcggtatccacgtcgaagtgcttctccagcacatcggccggcgaggcctgcagaccggcgaacagctcgcggcacgcgcgggcgatacggtcaggcgtttccaccagtccctcgcgctcgggatcctcgccaatcgacttcaggaacagacgtacggcttcgcgcacgccttcctcgtcgtatgtgcgtttctcccgctggcaagactctatattttcgttcatctcatctctcccttgtcattgtccacaacgacgtcggcccagcctgcgtacgtgagaaaccacatgaacaggtcgggccgaatcgtcatcgtgtctactcttccggcttcatgccgaccgagcgcttgaggctttcgggaatctccaccggcggcttgtccgagtcggggcggcggtcgttggacagccacaccggacgaaccggagccttcttgatcggcgcgaagatcgccgcaagttccttctcgttcagggtctccttgaccagcagctggcggaccagctcgtcaagaatctcgcggttgtcgttgatgatggtccatgcctcggtgtgcgcggtctccaccagcttcaacacttcgtcatcgattacttcagcagtacgatcggagtacttgcgcggctgcagaccatccatcacagtggtctgatcgtcgtcggaaccccacttgatggcgccgagcttatcggagaagccgtattcgatcaccatcgtacgggcgatgctcgtagccttctcgatatcgttcgaagcaccggtagtcgggtcgtggaagacgatttcctcggcggtgcggccacccatcgcgtaggccatctggtcgagcagctggttgcgcgactgcgagtagcggtcggaggtcggcatgacggcggtgtagccgagggcgcggcctcgcggcagaatcgtcaccttggtcaccggatcggtgttgttcaaggcggcggccaccagcgcatggccaccctcgtggtatgcggtgttgcgcagctcttccagagccatgcccttggacttgcgcttcgggccggcctgaacgcggtcgatggcctcgtcgatggcgcggttgtcgatcaactgggcaccggcacgggcgcacagcaacgcggcttcgttgagcacgttggccaaatcggcaccggtgaagcccggcgtgcgcacggcgaccatatgcaggtcgacgtccggtacgaacggcttgcccttggcgtgcaccctcagaattgcctcacggccttccagatcaggcgcggccacacctacctgacggtcgaatcgacccggacgcagcagagcggggtcaagcacgtcagggcggttggtggcggcgatgatgatgaggttggtgtcgttgtcgaaaccgtccatctcgacgagcagctggttcagcgtctgctcgcgctcgtcgtggccaccgcccataccggagccacgcttgcgacccacggcatcgatctcatcgatgaagatgatggcgggagcgttcttcttggcctcatcgaacaggtcacgcacacgggaggcaccgagaccgacgaacatctcgacgaagtcggagccggccatcgagtagaacggcacgccggcctcacctgcgatggctcgggccagcaacgtcttacccgtgccgggagggccgtacagcagcacgccgcgcgggatgcgcgcacccagcgccttgtacttggacggatccttgaggaagtccttgatttcctcgacttcggccacggcctcgtcttcaccggccacatcggcgaacttggtggtgggggtctggccctcgagcagcttgccgctgttcttcttgccgcccatgccgagcatgccgccggcaccgcccatgcggctcatcagccaccagaacaaggcaaggatgatgacgaacggcagaatcgaggtgatgaggtagctcatcacactggtctgctcgatattcgaggtccagcccttttcgagatcgccgttctccacggccttggccacctgtgcgccctgggcgaaggtgtagtagaactgcacgttcttgccgtagttggtcaccttgccggtgtcggcgttcttcttggtgtagtcattcttcagctcaaggcggacgacctgcttgttgtccgtgatctcggcgtatgtggccttgccctgattgatcagcgcgaaaccatctttagtatcgatggttttggtgccaccgccggcgaacatctggaacatcagcacaaccatgaccacgagcacggcaccccacagccagggggactgccatatcgggcggttctctttgttgcctttgccattgttcccgttattgccacggttgaacgggttggtgaacgggttgccgttgttacggttgttgttcgggttcgggttattgccgttacccggcccttgcgggaagctcatgcttgcactccttggtagacggacggcttgaggaccgcgatcgaatcgaggttgcggtagcgttcgtcaaagtcgaggccgaagccgacgacgaactcgtccggaatctcatagccggcgtacttcacatcaacgtccacctctcggcgggaaggcttgctcagcaaagcgaagacttccacggaagcggcaccacgacgtttcagttctgcgaccagccacgcgagtgtgcgtcctgaatcaacaatatcctccacaatcaaaatgtgccgtccgcgaacatcggcggacaaatcctgcctgactgtgacctcaccgctcgacactgtgcccgagccatagctcgacaggctcatgaagtcgatctgtacaggaatgctcatggcctgggtgaacgcgaccagcgtattcacggcccctttcagcaccgcgacgagcagcggattcttatcgcggtaatcctcgctcgcgagagcagccatctcgtggatcttggcatcaatctgttctttgctgaccagctcgtggtcaatatcttcctcaacgtcagcgattcgcatgcgctccatcttggcacacgcgaatgacgtgtttcttgcgattggctgaataacctctgggaagtgagacgccgccttgcccatgccaatcgacgaccagccggtcgatggcggcaatctgggcagcactggcgttcacaccggcttggctcagcgcgtgagcgatgacccgcaaccgaatcgcctctggctcacgtgcaatacgtttgacgctgatcatcaggccgatgccatggctcgaatcgttggtatcgcctgccacacaggctcgtggcgcatcggtcgataccgctgccgacgatgccggccaatcaactgccgcaaccgcctcccccatcacctcgtcggatcgctgatccagatactccttatccattctggccaaccgtgcgctttcggcgaaatggcgggtgacattgaatccagcgaatcgttcgatggccggcagcaggtcgtgacgcacccgcgagcgcaacggatagtcgttcggcaactcgccgtctaccgcatcgccattggtggggtcatcccaatattccacacctaagtcttcacagataccggtggtttcggctcgagtaagggtaagcagtggccgcgcaaaagtcgcgccactgcgtgtgaagacctgcggcatgccagccaacgcatccacgcctcgactgcgcagcaggccaatcaatacggtttccgcctgatcgtccatagtgtgggccaacagcacggcaatggcacccgattcatgcgccgcggcgcacagctcgtcataccgggcctgccgtgcggccgcttcgaggccctcgccgcgcgcctgtacggttgcgttgcgcatgatgaccgggcccagtcccaacgcgcggcaacgatccgcggcctcgctggcgacccgttcggagcctgcctgcaagccgtgatccacaatcacggcaccgcaacgcacgcccatggacgtgcatacgatatggctcaccgcagccagtgccatcgaatcgcgcccgcctgaacaggccacgagcacgagcggcgcatcggcggcaacggcatggtccccatgctgcgcgaattcgggagcctgcacatcgcatagttccacggcactcagcgttgcgcggaccgcgcctacggccttgcgcaatcgtgcggaatatgccatgtactcaccaccttttttctggttataggcactcgtgcgtttatggacgtttacggcctttatagcccttgatggcccttgatgcctcttttacagccccgcgagcttggtgataaacgagtcgatggcgctacgcgcggcggcataatcctcaggattgttgaccaccacggcaaacgacaacgctcccccattggtgcgggacacattgccggccatcgacgtaaccgtgccgaggctgccggttttgacgcgcagcagaccagccacggcatcatccgtataccgatcctgcgccgtgcccaccaatcccgcgatggatagaccttccgcaccagcagcaccgctctcggtggtcagattacgttgttggacggccgccagcgtgcgtacggtgagccgggagccgggagacaggccggagcaatcggccatggtcagaccggatgtgtcgagaccgagatcgttcagagtggatttgaccgcttccgtgccgccttcaggactgtttgtcgctgatttcgccaaggcggtgagtctgccgaactcctcggccagcgtattgtccgaatgccgcaacgtgtatgccatgatttcggacagtgttgccgaactcaccgaagccaaaggcgtttcaccggatggaacggtgtttgccgtcacgtctccggtaacggccacgccgttcgattggagcagttcggcgaatttcgtggccacatcgctggcggcgtgctgggacagttccgggtatccggccgaatcatcggggtcggccggcgcaggcgtatcggcggtgtattggcggcctccatcaatcgccattgatgagaccggcgtgaagtagacggtgtagtcgcttaagactgcgccgccttccgacagacctgccggaatgcgtgagtcgccgaatagggtgtcgtcgtactcgagattgacggaagtgatgcctcgctgggcgagcgcggccacggtggccttggccaaggtgttcagaccggcacgtccgttggtatggttggcgtcagaatcgcctgcagacagcagcatgtcgccattgcctttgagggtcaacgtattggtgccgtcatcggattgggtgaggaacacttgggtatccaaggtggatgccatattcagggtggatgaggcggcgagcgcggtcagcgttttcagtgtggatgcaggctcgcgtggagtgttcgactcatgttcggcagcgacggtgccttgggcgtcttcaatgatcaccgacgtatcgtttcccacgccttgcgcggacagcaattcgttgaccagcgcagaagcggccgtggaatcaatggccttgttcgcgttcaaggtgccggcgacggtgccgcctgatttggcggtggctggatcggcaaaaacaggtgcggcgacgggcttcaacgtcaataatccgggggccacgtcggtgatgtcggcggcgcagtaccccgcgaacagggcgatggtggtcagtgcggaaatgatgacggtcagtgttcggcgatgcgatcgttgggtccgccgttgcgcttcacgccgctgacggcgtgataccgctgtagataccatcgtgctccttatgccaaggcgatcatttctgcaatgaggcgaacgagtcgagtgctgccacaatcgaaagcattcgcgcatccatcagcttaccgcccagccatgtcccgagtgccaggatgccgatgccgttggccagtgcgaccggaataatcgccagccatatgccgccttcggctcccgtcagcagcatgaccagcgccacgatgccggtgggcagcatcagcagcaggctgccaagcacgtagacgaacgggaagaagccttgggccatggcgcggccttgaggcgcggagaacggcttgtccattgaggcgaccgggtacatcagcacacaggacgtgacttcggccacgcccaggccgctcaaggcgacgcccatgcccacggcgaggaagatcaggccggtgacgaggtcatcgggctgcgcccagcggccggtcagtgcgccgaccagcacgatgccggcgagatagagcagcaccatgtagacgaccatgatgccgacgtagacgcgcacgcggccgattctgtcggtccggccacgcacgccggcgatgacttccatggtgaagccgcggccgtcatatgcgagcccgttgctttccaccactgacatgaaccagccacaccagatcagcgactgccagacgaccgcgctgatgccgtgcgcctggaaggcgaagatgatcaggaacaggaccggcatggcgaaggtcatggcttggcgggggtctcgtttgagataggtgatcaggcgtgcggacaccgcgccggatgccgaatcgggcatccatgcgaatgcgccgatgcctttggcggtctcggacggactgtttgcgccgatggtgagccgttcatgcctcagacaccaagtgcatacggcgaagcagacgatccatgtgacggcaaggatggcgatgcgggcgatcagcaccgcccaagctccggtaagcgcgtcgaacggcagttggaaggccgcaccgaacggcgtccatgcggcgatggcggtcgccgcgccccaggtctcggtgttgaggctgaaggctatgccggagttgaccagaatgttcggcaactggcagatgatgacgaaagtcagcacgatgaagatgtagaacgcgcctttgccgcgtttgctggtcaccagcgtggtggatagggcgatgaccagtttggagatgctcatcatggtgatgacggccagcactgcggcgaggagggaactgatgattacggctggtcccatatgccgataggccagtgtccagagcatcagtgaggccacgccagtaagggaggggatgccggacaggccggaaagcagcaagccgaattgcaggttgcggtcggcgatgccgtagatcgcgaatttgcgtgggttcatggtggagccttcgccaagcatcatgagctggatgaagccgatgaagatggtcatggtcgcgccgaccagcacgacgactatgttgacgatgcctccgggaccaaggatgttcagcggaaagccatccgcgttcacggtgaagggcggcagtatgccgatgaaccatgcgagcacgccggtgccgatgatggtgccggccgcgagtacagcggaaaagacataggcgacggtctgccacgccgattttcgcagggtggcgagcgtgagcgtccagcgcaggcggaccagggtgatggcggtcttgatcattggcgggcctcatcggtgggtgtggcgggcgtaggcagaatcggctgaatcgtctgggccgaagttggtgcttgggcttgggcctgcccgccatcgagccacgcgagatgggcggcttcgtggcggccaccgactagttgcaggaagcggtcttcgagttcttcgccagcagcgacctcgtccaccgtgccggccgcgcataccagaccgtcgttgattacggccacatgcgtacacatcttttcgaccaatgccatcacgtgtgaggagatgatcaccgtgccgccagtcttcgcgtattcgatgagaatgtctttgaggttggcgctggacaccgggtccacggattcaaacggctcatccaagaccagaatgcgcgggctgtgaatcatcgcggaggccaggcagatcttcttggtcatgccggccgagtaatcggtgaccatcgtgttggcggccccggccaagtcgaaagcattgagcaggtcctgggcgcgacgcgtggtctcctcgcggctcatgccgcgcagcatgccggagtagacgagcaattgcaaaccggtcagtcggtcgaagatctggtcgggctggggcatgacgccgatcatgcgcttggccgtgttcacgtcgctccacacgtcatggcccagaatcatggcggtgccggcgtccggcaccaatagaccggtcaccatattgagcgtggtggttttgccggcgccgttagggcccaccagtccgtagaacgagccgattggaatgtcaagcgcgagcccgttgacggcgatcttccggtcgaagtgcttgaacaggccgcgaatggacaccgccgtattcgggttcggcggccatgcttgcggctgtggctgttgcgactgcgaagacgcgggagcggcggctggcatcatcggcggctgaaatccgacattcctttgagtattgtctaagctcatgcatctactctagcccaccagtcaaccctcagcgcagcacccccgggttgctgttggattgccccgctgagcagctccggactagcggactcggtcagcccttatgtgcgatgggcttccactgggctttggcgaagatggcctggaaggaaatcggcacgtagctgagcatgtaaatcgggaagctgagcacataggcgagcagctccttgttcgtggcaccgatctggtcgtgctcgacaatgatggtcaatgcagccaatgccatcagacccaacaccgatgtgatgatgccgctggaccaaccggccagcgattgcagctggctcgaccaactcacgaagccacacgcggcgaacagcaagcccatcaccgcgcgaatcacgcccaacacggtaaacggacacagcatcaaggtgaagtcgatgcaggagaaatcacgttcgcgaaccgcgcgtttcagcaatgccgagccataataacggaatacctgcaggaatcccttgctccaacgcaaacgctgacgccaactttgcgagaaggtaaccggctgctcgtcgtagaggatcgcagtaccgcaatagccgatgcggtcgccatgcagaatcgaatccatagtgaattcaagatcttcagtgagcaggtggaacttccatcccttgttccgcttcatcacctcgcgggagaacatgaatcccgtaccgcccacatggcaagaggaaccgagaatcatacgcgagttagacaggaatcgcgattcacggatgaaccacagcgcagaaccagaagacacccagttatccgccagattcaccgaattacggtagctggtcagaatcttgaatccggagcagaacgccttgttcatttcctcgaagtagtgcttgtccagcttgttatcggcatcgaacacgaagtaagcctcataatcatcggccacaccgatgtcgagcatatgccccaacagatacgtcagcgcatatcccttgccaaccagttcaagattgtggcgttccaccacatggcagcccaaagaccgcaccacgtcggcggtgttgtcggtgcagttgtcggccaccagccagatgtcgatgaggttggacgggtaggtctgatcgcgaatcgacccaataaggttgccgatcactttttcttcgttgcgcgcggagatcagcacggcataccggttggtcatcggggcgtcggggaagcgcacgggcttggcgaacagggacatcacgatgcacagtccctgatatatcatgccggcaccaccgacgattaccagaagaatatcgagtacggaaagcagggtcatcagcgccaccccgccctaggattgctggaggcagattgatcagactgcttggtttgcttgcgttgcttgggctgctcagactgctgcgtatccgcggcaccacgctgcggaatcgccacggtggcggaatcgtccaaatcggattctttcgtctcgtgtggcggaatcgcatagatctgttcctgcagcaaacgcagttcctcattcatcggcacacggctggtggaccccttggccgcacgcggcatgtgctcgccgatcggctgcagcacatgctcgccgaacgcttcggacgcctcgacgatcttggacttcttctccggagtcggatcgttcatcagtggtgagtcaatcagctcatagcgcttggtgtacgcacggaagatggcctgcagcgatgcggtgaccggcagcgccaggaacgcgccaaacgcgccgaacagcgagccgaacgccagcaccgcgaggaaggcgacggccgcgttgatatccatcgtgcgctgcgaaatcctcggcgagagaatcaggttctcgatctgctggtagacgatgatgaacaccagcaccgccacggcgtacgtccatccgcggttgccccaagcgaacagcaccggcagcgcgccgccgatataggtgccgaccgtggggatgaactgggacaccacgccgcagaacagggccaacggcagccagtagggcacatgcagaatctctaagaagatggcagtgcaggtggcgttgatcaacgccagaatcgaacgggagaacaggaaggacgaaatctggccttgggccacggtccacaccagcaggaatcggcgctgcgtgttgggggccagccactggcagaaggagcggcgcagtttggggccggcggcggagatgtaatacgcggtcatgaccacggtcatgaggttcagcaggaaggagaacaggccgcccaccgtactcatggcggtaccggcaaaatcggtgacccacgaggtctggatattgttgaagatttccatgccgagattgctgatttccggcatcttgaacgtggcatactggtccacgaactcacgaatctgctcatacatggccggcaaaccgcggaccatggcaatcatctgctgtacgaacatgttgccaaatagcgtgagcagcacacccacgaccacggccacgcccaccaagctgacggcagaagctacgccacgcttccagccatgagccaccagcgccaccaccagcggttcgacggccagcgccaggaacagcgagatgatgatgtcgagcaccagataggagatgtcgccccacgagcgccagcagaacatgaacacgatgacggcgagggccacatacagcagcgcgcggccgaaccattccggtggcctgcgggaatctcccttggcggggaacaaagtaccaaagtcgatacgattctcgtcgtccgggtctgccccggcctctgcggcaccggttctcgacgtgtcggtgctgtttacgtttcgcacgcgttcgctcatggctccccattgtagcgaggggtttgaagctcggatacgccggcggcgtacacccgcttttctattgttgatgttatgctcaacgtttcgatcatcatcccagcgtggaacgaagccgaacgcatccgcgactgcctgctgaacgccacccgtcagaccatcatgccgcatgaggtgctggtggtggacaaccgttctacggacaacacctgtgcggttgtcgaacagttcattgccgaacatcccgaggccccggtcaaactgttgcaccagaacgatgaacaggggctgattcccacccgcaactttggcctgaacgccgcgaccggcgatgtgctgggccgtttcgacgccgactgtatgatccggcctgactgggtggaggtggtctccggcatcttcaccgaagatccggccgcgatgggtgccactggtccggtgatgtattacgacatgccctcacgtcatttcgggttgaaaggcgacaattccttgcgcaagcgaatctaccgcgccgatggcggacagccgctgctgttcggctcgaatatggccttgcgcgcttcggcctggcatcagatcgcgaatgaggtctgccgggataaggccgatgtgatgcatgaggatatcgatatttccctgcatctgatgggcaaggatctgaaaaccgtgtactcgccgcgcatgatcgccgcgatgagtgcgcgacggatggatacgtcgttgagttcgttcctgagctacatgcgacgttttaagaatacgtttgatgcgcatccgcaacatacgcgcacgcataagccggaggtgttgttcaccgccatgtatccggcgatgcatatgttctacccggtgtggcagaaagtgctgaattccgcggatatcaatccggctgaagccgcgtggatcaacgagcagatggaactggcggaggcgcaaggcaagcagctgtacgacgagacccccaccgacgaagtctacgacgaaaagcacgaaaagtagctcgatatacgagccctctctgcttatgcaagttccctctgataagggggctgtcgaacgaagtgagactgaggaagagactgcgacgcagtcgctaaaacattgaatcggacgcaggccgatacctattattcagcggctacgccgcaacttctctccctcagtcagctacgctgacagctccctcatcagagggagctaatgtttactgtcatcgactgatcacatcagcgacttgtaaatcgcgaggatgtcctcttcggttgcctgacgcgggttgccgggggtgcacacgtcgtggaacgcgtcgtgagccaacggctcaaggtcggcctcggtggcgcccacttcggaaatcgtggtcgggttcttcagatccacggtcagcttgtggacggcctgcacggcctcttcgcgcaccttctccaggtcgccggtgtaggcgtcctcaacaccgaacgcatcggcgatgtcgcggtacttctcaccggtgaagtccttgttgtattccatgaccggggccagcagaataccgttggccacaccgtgggccacgcccagacggccgcccagcgggtgagccatgccgtgcaccagaccgaggcccacgttggagtaggccataccggtgatgtaggaggcgtaggccatctgctcgccggccggaatgtcaccgtcggcggacttggccaggttcttggcaatcatgcggatggtctgcatggacaggcagtcggacaggctccaggcacccggggtaatgtaaccctcgatggcgtgggtcagggcgtcaagtccggtggcgaccttcaggccgcgcggcatggagtcggtcagatccgggtccacgaaagcgacgatcgggatgtcgtgcgggtcgacggccacgaacttgcgcttgttggccgtgtcggtgaccacgtagttgatggtcgtctccgaggcggtgcccgcggtggtcggcacgccgaagatcgggacggacgggttcttggtatccgcgacgccttccagggagagcacgtcggcgaactccgggttggcggtgatgatgccgatgcccttgcaggtgtcttgcggggagccgccgcccagaccgatcaggaagtccgcaccggagtcggcgaacttggcgacgccgtccttgatgcactcgaccggcgggttcggcttgacgttggagaacacctcgtacggcaggccggcctcatccagaaccttggtgaccttctcggcggtgccggtctccagcagcaccgggtcggtgacgataaatgccttggtgaagccgtgctgcttggcgacggccggaatctccttgatcgcgccacgaccgaagtatgcagtctgattgaaaatcatgcggtagaccataggggctctccttttgagctagtgtcttaactgatggcccactctgtctttgagtggtccaacggttccccagtctactccgcgcatgagcattcacctgaaaacacgctgaaagaacaacactgaaaataatggcaagaaatggcgtaattccgcacttgtcgaattattgtccattgaccaaaccagttccatcgcccgaaatctcaacgataaaaccgtttccggagtcatctgacgctctccgagaaactcgtctctcatccgcttacttcgcgcgtagcgcaatcaatatgcgagatgcctaattccattcgtgcttcatcagccgaacgcgaactggttcaccagatggtgtattcaacggtttcagtctcctgaagaggactaagatacctcgacagttggggtgatcatcataagagaatgaggtagataatggcaaatggcaaagctatgacggtcggcgagatggcgtccctgtttctcgaccccgccactcccgttcgtatcgacgctttcgacggctcgcatttcggcccggcagacgcggatttgaaggtcaaaatcgccacgccgaactgcatgtaccagctactcgcgcacccgaatgaaatcggcatcgtgcgctcatacattctgggcgatttcgacgtggacggcattgactacgccgacccgtatccggcgatgcgcaagctggtgtcgctgtccaaatacgttcgcccactcactcccacatcaattgcccgcgtatctgccggcatcctgagccatggcttcaagaagccgccggtgcccgccaccgagggcccgagcaagttcgcccgtatcaagcgtggcctgatgccgcacacagaaaaggccgattcggaaaccgtcagcttccactacgacatgtccaacgagttctacgccgacttcctcggatcctccatgacctacacctgcgcggtattcgacaacgagcacatgagccttgaagacgcacaggccaacaaactgcgcctgattctcgacaaactggacttgcagcccggccagcgcttactggacatcggctgcggctggggttcgatggtcatcaccgccgcccgtcgcggtatcaaggcgctcggcgtcaccctttccaaggaacaggccgcgtacgccaacgaatggatcgcccgtgaagggctgcaggatctggccgaagtgcgtgtgcaggactaccgcgaggtgcctgagcacgacttcgacggtatctgctcgatcggcatgatggagcacgtaggcgtcaagaactaccagagctacttcgaagagatgttccgccttctgaagccgatgggccgactgctgaaccaccagatcaccatcagccatgacaagcctcacggcaagcccggtaccgacgaattcctcgaccgttacatcttcccggacggtgatctcggcgcgcccggcttcatcgaatcgtgcatccatgacgccggcttcaacgtggtgcatcaggagaacctgcgccagcactatgcactcaccctgcatcactggaaccagaacctctccgagcattgggacgacgcggtcaagcaggtcggctttgaacgcgccaaggtatggggtatgtacatggccgcctgcgctctgaacttcgagctcgacggcatccagatccaccagttcctggccgtcaagccggatcgtgtgggccacccggacggcaagtggtaccccctgcgccaatggtggcaggcctgattcctttttgtgggacggcacgcggtttttaccattgttcatctgccgtcccacacgattctcttcgcacgcgcatttcgcgggtgctttttctgcaatactgactctacgagcgccacagccccagacacggctggggcggacgatcgcaccgaccatgacacgcgcggataagacccacgtttctttatttacttaacctgatgttcgcattggtgctgttggcgtgcgtagttgcggcgaggaagacagttgttggcgaacgcgagcctttgcattgaccggccagcccgccattttggcctataacccccgccggagtaggtacgcgacggatatgcaaaagccccgcacaaggcggggcttcattatggtggctccgaacggcgtcgatccgttgacctagcgattttcagtcgctcgctctaccaactgagctacagagccatgaacagtcaaaaacccggataatccgggcttcataaccattccagcgaccccggccggacttgaaccggtgacctccgccgtgacagggcggcgctctaaccaactgagctacggggccattgttctcacttgcgtgaggcaacagatgtatatattactgaaattcgccagtcatgcaaacttcggcgtgttccgcataatttcaaggtttttgctatcaccagcacgcgaacacgtctgtcacaaacatccacaaaacgacgaagggcgcgaccggaaccccggccacgcccttatggacggaaacgcttcgcggcatccaccgcaaagtgaccgtcaatctcagtcagcctgcttccaggtgtcgacgtcgatgtggtgttcggggttggcctgccaggcatcccacgcggacttgacgatgtcttccacgtcgtacttggcatgccagcccatctcctcgttgatgcgcttcggggagccgatcaggtgcggcgggtcgccggcgcggcgggccatgacagcctcggtgaacggcagaccggtgaccttcttgacttcgtcgacgatctggcgcacggaggtgccttcgccggtgccgacgttgaaggcgtcgtacttgcgctcgtcacggtcgaggtacttgagggcggcgatgtgggcgtcggccaagtcggagacgtggatgtagtcgcgcacgcaggtgccgtccggagtcgggtagtcgtcgccgaagatggcgggagccttgccctgcttgaggcgattgaacagcatcgggatgaggttcaggatggccggatcctcaagctccaccggaccgcagccggccacgttgaagtagcgcagcgcgcagaagcggatgccgaacggctgctcgcaggcgcgtgccatccactcgccgaacagcttggtctggccgtaggggttgatcggcagcatcgggacgacgtcctcaggcaccacatcgaccggcggcacaccataggtggcggcggaagaggagaagacgagcttcttggcgttcttggactgggtcatgccggtgagcacgttgagcatgccgttgatgttctgctggtagtaccacagcggcttctccacggattcgccgacctgcttgcgagcggcaaagtggatcacggagtcgacgccttcggcatcgaggatttcggccaaacgctcaccggcgcccggggcggcgatatccatgccgtacaggcgggagccttcgatgcgagtgggcttgccgtagctcagatcgtcgacgacaacgaccttttcgccggcctgatggagtgcgtgaacgacatgagcgccgatgtagccgcagccgccggtgacgagaactgtcatagttgacctttccttgtgcgggttgcaagtgtcggccgtggggagttcagcggctgttcacttttggtccgctttgttaccttttgaaacaatttgagtatatcacacgaacataatcgcacaaaacggtggtgtcgtccggcaatatctgcattcattaggtcgatttggcgttcattaggtaggtcggcctggagccggcccgcacggacaccgggtaaatggcttgatatggtggttggtatcgcacaccacctacctaatgaacgccaaatcgacctaatgaatgaacagcggtgcggcgtacaaggaaaatccgaggaatatatgaccgatcccgaatccacagcaatcgatcccgtcgccgcgatgggcacagaccacaccgaggcaccggcgcaccccctgcacaaggtgctctccttcgtacgccgctccggacgtttggacgatcgcctgcaacgcgcatgggacaactatgccggcacatatctgttggacattgcggccggcaacctgctggacgtgcgcgaaggcgtcacgctcgaccgcgcgttcgtggagtccgcatggggcaacgataatccgctcattgtggaaatcggcaccgggcagggagaaaacgtggtggcagcagccgcagcccacccggagacgaacttccttgccctagaggtctatgaccccggcgtggcccacacgctgctgctcgccggcaagcaggggctgaccaacattcgcgtggcccaggtcaatgcgcccgagctgttcaaggtgaccgcggccggcaccgtggccgaggtatggaccttcttccccgacccttggcccaagaagaagcatcacaagcgccgcatcgtgcaggaggccatggccggcgacatccatcgcgcgctggccgcagacggcgtctggcgcatcgccaccgacatcgaggactatgccctgcacgtgcacgaggtgatggacggcctcgatggctggaagaacctgggcagcgtaaccgtcagcctgccgctggagcacgtgggcaagggcaatgccgacatggccgccgatatgccgcacgccgacttcaccgaatccgagcgattcgagggccgcgtgctcaccaacttcgagaagaagggcctggccgccggccgcgtgattcatgactttacctatcaggccgttaccttgaactaatcacgacacgccgaaatgccgtcgatttgcataaccgaacaacctcccgtaaagtaattcgagttgttcgcccccatcgtctaacggttaggacaccagactttcaatctgacaacgagagttcgactctctctgggggtacttcactaaagacctcggtcatagcgaccgaggtcttttcgtattcgcgggaccaggtctgaaagcattcggcccgcttgatatgtgctcatggtttcatctcagcacgtgttcgcgcccgccacaaggactatcccaccgtagacgatgtgacatcctccacactgtgacttcgcgcacagggtcccgacgccaccctcaccccgtttatcgacaccatgcgtgtataaccgcatatggcatcatcggcgaacatcggccggcagaccagttgtacaaggagaacatcatccacatggcagacaccgccaacaccaacaccaacgcctggctgccggcgctcaaagcggcgtttccgctgaccataccgatttgtctggggttcctgtttctcggcgtctcgtatggcgttctcatgggcaccaaaggcttctccttcgtatggccgatgtgcatgagcgcgttcatcttcgccggttcaatggaattcgtcacggtgaatctgctgctctccgcgttcaacccactcgccggctttctgctggccctgatggtcaacgcccgtcacctgttttatggactatccatgctcggcaaattcaaagggctcggctggaagcgtccgtacctgattttcggtatgtgcgacgagacctttgccatcaactccaccgcgaaaatccccgccggtatcgaccgtggctggttctacttctgggttacgctgtgcaatcagctgtattgggtgaccggcgccacactgggcgggttgatcggcgcgcatctgccgttcaataccgacggtcttgatttcgtactgaccgcgctgtttctggtgatcttcctcgatcagtggctcgacggcaagcaccgcgagcgactgtccgccgtcatcggtgtgctgacatcactggcctgcctgctgatattcgggaccaatgatttcatgattccctcaatgatcgccatgctgatactgttcgtcgcgttgcgcccgcatctggacgtgttgcggccggccgccgacgccccggaagccacggcagaccgtgccatgagccacgcagcggaccagcagaaggaaggacagacgcgatgacgatgaccatctggcaaggcgtaatcactatcgtgacggtggtgctgggcacgatgtgcacccgttttctgccgtttctggtgtttcccgaatccaagcagccgccgcgcatcatcgagtatttcggccgggtcctgccctatgcgatgaccggtctactggtggtgtacgcactgcgcaacaccccgattctgaccggctcacacggacttccggaactcatcgcctgcgccgtcatcgtgctgctgcacgtatggaaacgcaatatgctgctttcaatcgccggcggcacgattgtatatatgttgctggtgcaactggtgttctgaggcaccagactcgttagtctcgccctccgcttcgcggtgacggaggtagagacccgcagtcgtaagactgcgaaacacacagcatcggccacaggccgattcctacagctgcttcgccacccaatcgacgatgtacggggcgacttcctcaatctggtcgatggcgacctcgaactcgtgcttgccgccgtaccacgggtccaccagatcgatctgatcttcgcggccgggcttcggcttgggcagattcgggtcgaagctgcggtacatgtgcacttcggcgcgcttgccggccggcagcatgcgcagcagggcgcgcatgtgggaggcggtcatcggcaggaacaggtcggtacggtcgatttcctcacgcgagatgcggtgtgcgaagtggtcacgcggaatctcatcaccatagccacgttcgcgtagcacgcgcacggcacgcgggtcgatcgggtggctccactcctcgtcggacacaccgctggattccacgttcacctggtcgccaagaccgcgctcattaaagaagtgacgcagaatgatctcacccataggcgaacggcagatattgccggtgcagacggtcattacggtgtagggctgggtattgctcatagctttgaatcaatcctcaatcgggcttcaccgggccgcacacggcccgactgtattgttggggtcgaatgaatatgaatccggctcatgccgctataaagggcataagccggattcgcatgcttacttggttttggccaagatacggaaacgataggaatcgatgccggactcctccttggcgggcgtatgccactcgcccacttcggcttcccgccacatcccggcctcgaccagcgacgccatatcgggcgcgtagctgtcggcatccacggtggcggccagatcagtcacataggctttgtccgcgaacggcaaagccttggcgaacaactgggcgccgccgatgatccaaatctccgaacggtccagaccgtcgtccggaatcgcctcctgacgggccatatcgagcgcgtcgtcaagactggtgaccacagtggcccccggcgcacggtacatcggatcgtgggaaacgacgatgttgtcgcggttgggcagcggccggtacttgccccccagcgattcccaggtcttacgacccataatcaccggatgggagacggtcagctccttgaaatgcttcatatcctcggcacagtgccaaggcatgccaccattgaggccgatggcaccggcgcgaccttccttgtcacgggcttcggcccagataagattcaccgagaaggtcttgggataatcgtcaccccagtcttcttcagtggcagacagcccggcagatccgggctcgggttcgtgatagccgctacggctactgtcatgctccatttcgcttactcctcctggattgcggaactgggccttagtgtagtggacagcgaagactcgggggccgtcaccttcacagtattcgctgtccacgaaacggtaatcagcatcagaccgcaacaggtgccttaatagtggggtgatgctggtagccgacgaccttgaagtcctcatactggtagtcgaacagggaatcggccttacggatctcgatggtcgggtacgggtagggcttgcggcccagctgctcaaggaactggtcgacgtggttgtcgtaaacatggcagtcgccgccggtccagacgaattcgcccggcttgagcccggcctgctgcgccatcatcatggtgagcagcgagtaggaggcgatattgaacggcacgccgaggaacatgtcgcaggaacgctggtacagctggcagcttagcttgtcgtcggccacgtagaactggaagagcgcgtggcagggcggcaacgccatcttctccacctcggccggattccacgcggagacgatcatgcggcgcgaatccggatgatgcttgatgaggtcgagcacattggagatctggtcgatggtgcgattcgggtcctcgggggtcggcgcgggccaggaacgccactgcacgccatagaccgggcccagatcgccgttctcgtccgcccactcatcccaaatatgcacgttgtgctccagcagccagttgatgttggaggaacccttcaaaaaccacagcagctcataggccaggcctttgaagaacacggtcttggtggtcagcaacgggaagtacttcgacaggtcaaagcgcatctgctggccgaacagggaaatcgtgccggtgccggtgcgatcggacttcagcgtgccttcggtcaggatcttgcgcaccaggtcctcatagggcatcggaatgtccgtttcgggacgtgcggggatacgggagcgaatatctgcgagttgttcttcggtcaaagccatgtgcaccagtgtagcttaggggcataatagagaagtccactgatgcgggagagcggccaggtgccgcgctcccccgctggcatggcgatgggccagatcgccggcggctgaaaataaaggagcagctatgggtaagcgactgtgggttgagcgtaacaaggacggttcgtgggatgcgttcagcgacgatggcgcacacattaagttcggcaaggatcgtggccagttcacgccgggcgatctgatgaaggtcgcgctggccggttgcgccgcgctgtccagccagttcgccatcgaacatacgctgggtgagggcaagggtgccaagattgtggtggatggcacgtacgacccggaaaatgacgcctacaccggtttcgaggagcaggtggtgattgatgcttccgacgccggtctgtccgaggaggatgccgacaagctcaaggagcgcgtcacccgccatatcgacaagggttgcacggtcaagcacacctacgtgcaggagaccccggtgcgcatgaacgtcaccgtcaagcactgagacgggatataaattgaagaggctccctggcgggagcctctttccgtatattcggactttactggcgatcgggatcgatggtcttttcgatctgctgggcgacttcaggctcggctgcggacaccggaatctcctcgacgccggcaatctcctccagcgacttggtaggcacttcggcgggcgagctcggcacggtgtcgagacgcgattccgcggcctcaacatacttgcgtggcaccacgtacaccgggccgaccgcatgctgcagcaggccctggctggtggagcccagcagcaagccagtgaagccgccgcgaccacgggagccgacaacaaccacatcgtgatcgtagctggccttggtcagggcgctcacggccgggccggaaacgatctgcttgttgatcttcagatcaggatgcgattcctgcaacggcttgatgcgcacctcaagatcgtccttgtaggactccatgacggcgtcctcgccgtccacacccttcaggttcggcacagcggaaatcacgtccagttccgcaccccagcacgtggcgaagtcggcggcaatgtccagcgccttcagaccccacttggattcgtcggagccgacggccaccttggtgatcgtgttgttcaggtgcatcaggttaccgtcatcatcggtgtacggcaccaccacaatcgggcagtaagcatatgccggcagcgatgaggacgtagtgcccagcaggcgctcggccagaccgcccttgccacggttgccaatgacgatcagattgtagttacgagacaattcgacgaacaccgatgccggatctccggtaacaatcagtgtggcggcttcgacgccctgctcgtctgcgatggccttggccttggacagaatctcctgagcatcggaatgcgcggcgttatcgtcccccatcgccgtgtaagtggcatcgaacgaaacggcggcatagctcggcagggaatatgcgcagacaatctgcagcgtcagccccgcgtgctttgcataattcgcggcccaccatgttgccttgtaactggcatgcgacccgtcaacgccgacgagaatagccttgtcgttaatcatgacgacctccttgaagttattgcggcacgaataccgcgtatctcaacaataccccgcgacactcggtttggccggtatcctccgctcaaaaagaaatccgcgtacacgaaaaaggcacaccccaaaggacgtgccttaatacgaattcgcttaccgcataattcttgtcacatcacgcggcgaatggaatatccagctccaccgaatacggaaacgtcgcttactgccgttccctgcaccgggttcatagcattcatcacctgtccgttaccgatgtaaatggccgcatgagtaccattcgcaagaatgtcacccggcttggcatccgccaagcttgcgaccggagtacccacggtggcttgagcaccagaggtacgaggcagggagatgccaaactgggagaagacgtactgcacaaaaccggagcaatcccatcctgccggagtgttgccgccggcaacatacggatagccttggaacttcagtgagaagctagcaagctcagcgccagtgccagtgccagtcattttacccaagtcaacctgtggaatcgacgcacgctgttcagagcggctggctgccgcagcagcagcggactgggctgcagcagcttcatcagcggctttctgagccgccgccgctgcagcagcttccttctcgccctgagactcggtctgtggcacatcaagagtctcgatgccaccccatttagagttctcatcaaccgaggtggaggtggattcggcgaacaaattcttcttcaccgaactcgccttcgggaaagaacgtgaggacaccacagcactcgtctgcgcggaatcggcagaggcaaacggggctacgcacgcaaacatggcacccgtggcgataatcgccactgatgtggaaataatagtcttaacgctcatcatcaacgccatacactagcacacatgggtcgatttcataacaggaatagcatttcgaagatgatgtcgcgggtgcatcattcggcaggagaacgcaacaggcctcggataccgatcggcatccgaggcctgcaataaatcaatcaataagactgcatcacgggatacgcaccacgatggtgagcttttcggtcatggcactagcgagagccacgctatagccattccatccaccatggaccgcctgaccgttgccgacatacaacgccacatgatcgtagtgtgcaccaccgttccatccaccggtgttggcataaatcagaatatcgcccggctgcagggatccgtctgtgactacgtggccaccaggaacattgacgtactcttcaggccaaccgtggaagttaatgccacgggccgccaacgcttgactgaccaatgcggtgcagtccatgctctgtccgatcaaagaatacgcacggtcgatagaggcaccggcaccagcggaaaccgaaccactggcatcggaataagtaacagaagagcgagactcattacggctcgcggcgttggcctgctcctgggtcgcctgagcctcgacctccgcctgcttctcggcctcctcttcggcagccttcttggccgctgcggcatccttttccgcctgagattccgtctgcggcacatcgaggttctcaatgccgccccaatcagcattgtcctcaacgctcgtggcagtggcttcagtcgtcagatctttgcgcacctgggtgtacgaggggaaggacttggtggaagtcacagtaacaccctcagctgcagttgctgtaggaacaaacataaacaagcaggcacaggagacaatcgcggcaacaatggaagaagctacagttttggtcttcatagaaccatcaccctacacggtgcgcattaactcgtacaggatggaagaaataaaacaccccggagctattgggatatatcggcgtgtcggcacaggtcagttcggactaatacgcggccgcaacacttgaaatgtcatttcgcgcgaacgattgccgatagggcgacgtcacatccgaacagtaatcaccgaatgtaagccaatgaaatgaatcagtagtgaacgtactggaacttaccggcttcggcggcgctgaacgtacgggtcgaaatcacacccaatcccttggcattggattcggagatctcaatggagccgtcggcattgatcttttccagaacggcaacatggccgtacgcgccatcggcatcggcctggccaggagcgaacaccacagcatcaccgacatggcgaggagtgttgtccacccaatagcccagagcggaagctgacgccgcccacgcgccaccattgccgaagttgccgctggaaggcaggcccagttcggcacgacgctggtacgcgtaccacgtgcactgaccccacggatagttgttggagttggtgccaacggcatggttcgggttgaagccagccggcacagcatcgccatcggcatccacgagagccgacaccacaggattgttcgcattattgcgattcatcagcttggcgtccaaggtgctgtctgaattgctcagcccccagccgccttcattggtggactgtgcggtaacggaggatgaactcaaatcagtacgcgcttcggaacgagaagccgcagtcacatcgctgatgcgcttaatctgcgtggtcgtcgtggccggatcagccacgaacgagttcgtggcgtcttcattgttggaaaacgcgagagcacctgcggccgtgccgaccagagcggccagtgaggccgaggcaagaatatggctacggcgttcagcggcacgagcggcctcacgaatggaacggcgggtctggggagcgatttcgttgatcttctcggcaatggccggatcaagccccaaaacaacggcgtcgctaccagcggattgcaccgcacgcacagcacgaacggaatgagaacccttgccggaggcaaacaatgccttcgctaagctgaacttctggcgcgagaccgtggtcgctttatgcgaagcatgcttcatactacgttaactccttggatgggttcggcggggtcatttcgacgacctcgtatgaccgtcacaattgagtactgtacaacgaacagaggtcaatcctcaatgtgatcccccaccatccgggtgtgtcaaacgatttacgtaaccgtgcggccgggtgaaaaaactgccttgtttccgcccgttcacgaacctcactatccggttatcggaagaatcactaactcatgtcattccgacacaccgtagccatgatgtgctgcgtacattctgcactgcattccgcattgccaccactgccgcccggcaccccggaattccgcagtaaccccgcagtaatcccgcacaccgagcattatccgcgatattccccaacactggtctacccttgaaaccatgactatcacactgagtattcccgagtcgctgaagcccgaagatggccgcttcggctccggccccagcaaaatccgccccgaacagatcgccgcgctcgatgccggcgccaccaccctgcttggcacatcacatcgccaggcaccagtcaagcaactggtcgcttcgattcgtgaaggtctgcgcgagttcttccacctgcctgaagggtatgaggtggcgcttggcaacggtggcgccagcgcgttctgggagattgcctgcgcttcgctgatcacccgtcgcgccgcattcggcacgtatggctcgttcagtgccaagttcgccgcgtccgccgcgaacacacccttccttgaagacccggtgctgttccccggcgagccgggcacttaccgtctgcctgagctcaccgagggcgtggacacatattgctgggctcacaacgagacctccactggtgtggccgccccgattcgccgcgtggccggaagtcgtgaagctggtgccttgaccgtcatcgacggcaccagcgcagccggcgctttgcctgtggacatcagccagaccgacgtctactacttctcaccgcagaaggccttcggtgccgatggcggtctgtgggtcgccatcctctcccccgaagctatcgatcgtgcggcaggcgtcgaatcaagcgctcatctggaaggcgcacatcgctgggtgccgccgttcctctcgctgaccacggcactgaacaactcccgcaaggatcagaccctgaatacgcccgccgtggccaccctgatcatgatggaaaaccagattcgctggctcaacaacaacggcggcctcgcctgggccaccacacgttgcgccaagtccgcatccatcctgtactcgtgggccgagcgctccgaatacgccgctccgttcgtcgtcgatgcggacgcacgctcgaacgccgtggtcaccattgatctggacgagcgagtccaggcctctcaggtactgtccatcctgcgcgagaacggcattgtggacgccgccggctaccgcaagctgggccgcaaccagctgcgcgttggcgtgttcccctcggtggaaccggctgatgtcatggccttcaccaagtgcgtcgactacgtggtcgagcacctgtgatggcatatatgccccgcattgccgaccatatatgccatgcacattgatcggtctcaactgatgccgattgaataaatcgtagggagggatgtttgacgcccctccctactcttactacagtgcatgagtatgaagttcgcgcctctcattgaccctgccgtccgcaaacccgcacccaagcccgtacgggtggatctgcgtaaggtgtttgccatcggtaccggtctatggattgtggcgttgattgtcgtgctgattctgctggccgtgggctacagcgtaatgccgttggtgattatgtgcgtggccggcgtcattattggcttgctactgctggtctgggaatacttcgaccgctgggactaccgccgcctcggacagtaacgcaacacaagctccctctgatgacgggagctgtcagcgtagctgattgagggagagaccgcggccgcaggtcgctcatcaaacagcattggtggcatgcaaggcatgccaccaattccttacctcactgcgccaacggcaacgtaaggctgaacgtactgccttgcccgggcgcgctccatacggtcacatcgccatgatgggtcagcgccacatgcttgacgatggccaagcctaggcccacgccatccgccgtgcgattgctctgttccacgccccggtagaaccgctcgaagatgcgcgcctggtccttcttagcgatgcccgtgccttggtcaatcacgcgaatcaccgcgcggtcgccatccttgtctttggatgcggacacgctgaccacgccattttccttggaatagccgatggcgttttcgatgagcttggtcacggcgctgtcgatctggtccgcctcaccattgatgactagatcatcgtcgcccttgatgttcagctgcacgccagcctcggctgcctgcggctccagtcgcgccgccgtggccctgagctgttccataacgttcagtcggttggcggaagacggcgtaatcggctcctgcgcgcgtatgagcagcagcaaatcagacaccatgtggttgagcttgctgcagctggaacgcacctggcgagcgtcggcagccacctgctgttcgtccagattgccggactccagcgaatcggcgagtttggccagagcctcagtggggcccaacaattgctcggacacattggtaataaacgagtcacgcacttgagcgaaacgaatcacatcactgacatcggtaatcaacacgatgacgaactgctcgttgatacgccctacagtcaccttcagccagttggggcggtggacggactgcgtggcgacgtgatcgcccttgttctggtctgcgacgtaccgctccggagtatcggtggtcaagtcgaactggcgcttgccaccggacttgcgcgcctcgtgaatggcatccagcacatgctgctgggcaatggcgtcatctgacaccacacccaggcggtaggcggcgggattgcagcggaccacctcgtcgtgctcgtcgaccaccacggacgcacctggcagcatggacagcagcgtggcggtgtcgtcggacagatcgtcattgtcgtcatcatcggccagcggcgattccatggacactcgatgtgtcgcaaatcccacgatgagcgtgatgattcctaccacaaataaaacagccgtgacaataagagcaatcgcggcgacgagcggcatctgtgtcatgcccccattctttcacaccacacgccgggattgcggtttgccggcacgccggtaacatgaatttcaggtgaacaacccaatgaacagtagaacaacttgaggttgccattacctacgttgaagtggggaacaagtactggaataatacactggtacaggttgcaataagcaagcatgaaaggctagagaaatgcgcgttattttcaacgaggagctgaagcaggttgctgacgacctcgaccgtatggcgcagaacgtacgcaaggcgatcaaaggagctggggaagccctgctgaatcaggacgttgaagccgcacagactgtgattgacggcgacatcgaaatcgatgccctggagtcctctgtgattgaccagtgcgtcaagttgctcgccaagcagaatccggtggccaccgatctgcgtgtggtcgtttccaccatgcgtctggcttccacgttcgagcgtatgggcgatcttgcccgccacgtggccgaggccgctcgccgcacctatccggccgccgcgattcctgaatccgctcaaccggtgttcgccgagatgatcgacttcctggacaacaccgctgaccagctggtggccatgctcttcgatcgcgatgccaagaccgccgaggccatcatcctggctgacgacaagctggacaatctgcaccaccagaccttcgatctagcgctgtccgatgacatcacccgtcagcagaccgtggatatcgtgctgctgggccgcttcctggagcgtctcggcgatcacgccgtgtccgccgcccgccgtgtggtgtacatcgtctccggcttcgaccccactaaggagccgacccgcgacgagggcaccgacatcgactgattgggacttgttctcacattgggcaaataactgaacacttgttctcctgtggtttgaggaggatgcccgaaagcggcgatccggctacggctggacgccgttttttgttgcttttgggcggtacaccggcgtatccatggggtaatcaccgccccatgggggatttggcaggcatagcaaaggggagccgcacgttatgtgcgactccccttacagcttgtaccgtgttagcggcttaggctcacttctggccctgagcggcgacagcggcggcaccggcagcagcagcctccgggtccaggtactcgccacgcggcttaatcggcttgaagttctcgtccagctcgtagagcagcgggatggcggtcgggatgttgaccttggcgatctcttcctcagacaggttgtccagcatcttgacgatggcgcggagggagttgccgtgggcagcaatcagcacggtcttgccggccttgagctccggctcgatagcggactcgaagtacggcttcacacgctcaacaacgttggccaggcactcggcttccggaaccggatcgccggcgtagcgcgggtcgttgttctgggcgtactggtcgttcgggtcgatctcgggcggcggggtggcgtaagaacggcgccacagcatgaacttctcgtcgccgtactcttcgcggatctcggtcttgttcttgccctgcagagcgccgtagtgacgctcgttgagacgccagtcacgctgaaccggaatccacagacgatccgcggcatccagagcgatgttggcggtgttgatggcgcgacgcagcagggaggtgaacacgatgtccggaaggacgttcttctccttgagcagctcgccgccgcgcttggcttcggcttcaccctgctcggtcagcggtacgtcgacccagccggtgaactggttggttttattccatgcgctctgtccatgacggagcagtactagtttataagtcatacggttcagtctacagccgcgtgcgcccaaacacgagtattcgtcttattatttcgctctcagagcgccacggaaaccgccagcaccaccgcaaacagcaacgtctggaaactggcggcgggcagagccgggcggaattgacgtttattcacgctggagaccatgcgcacaggtattccggcgcccgagagcaacagcaccgcaccccacggccaccataatgtgccgcacatcagcagggcgatgatccatgcgatgacgcagcacacaatcagcagcgtacgcgcgccggactcccccagccgtacggccaacgtgtgtttgccatgctcacgatcctcgtcgatgtcacggatattgttcaccatcatgatcaggcaggagaacaggccagccgccacagcacccaatagtccgccgacgtccaccgtgccgcacagcgcgtattcggtgcccaataccgcagccaagccgaagaacaggaacacgccgacttctcccagcccgacgtatccatacggatgcttgccactggtgtagaaccagccggccagcaaggaggccgcgcccacggccagcaaccaccatgcttgggcgagcacgaccgccacaacaccgcatatgcaggcgatggcggcgcaaatcatcgccgcgaacagtacatgctcggccgataccagtccggatgcggtcagtcgctggggtttgcctgatttcgattcgtccgtgtcacgcccggcgtcagtaccgcggatgccatcggaatagtcgttcgcatagttgacggcgatttgcaggaacagcgcgactagcaggcacaggatggtcactggccagaatcggtccatcagcagggtctgctgttcacgggccgtggcgcaggaggccggttcgggatatattgcgatgcaggtgcccgactgctcgatatgcacgtatgccatcgccgccccaaccatcaccgacgcgatggaagtggccaaggtcttgggacgcgcgccccgaacccacaagccgatggacataagcaatccctttcatatataactcggctcccctcagggaggggagccagagtatgcctaatcagccaacgagcggcttgaccagcgggaaggtgatggtctcgcgaatcgtggcaccggtcaaggcgataagcagtcgatcaatgcccatacccataccgccggccggaggcatgcccacgccgagagcctcgagaaagtcctcatcgatgtcgcaagcctcttcgtcgccggcgagcgcgtctttggcctgagccacgaaacgttcacgctgcacgatcgggtcgttgagctcggagtagccggtagccagctcgaagccgcgcacgtagagatcccacttctccaccacgccgggcttggtgcggtggcccttgaccagcggggaggtttcgaccgggaagtcacgcacgaaggtgggctcgtaaagcttgtcctcgtagaagtgctcccacaggtgttcgacgagcttgccgtggttctccacgtcgtcgcgctctacaccgagcttgtcggcaatctcacccaaatgctcaacggaggtgccgggatgctcagggccgccgttcggcacgatctcctcgcccaacgattcggacagggagtcgtacatgctgatggtcttccattcgccgccgaagtcgtattcggtgccgtcgagcagggtgaccttgtgcgagccgtagacgtccatggcggtcttctgcacgagctccttgaccagctggccgatggaatcataggtgccataggcctggtaggcctcgaccatggtgaattcgggggcgtgcgtggcgtcgacgccctcattgcggaagtcacggttgatttcgaacacgcgatcgatgccgccgaccaggcagcgcttgaggaacagttccggggcgatgcgaaggtacaggtcaaggtcgaaggcgttcatgtgcgtggtgaacgggcgggcggccgcgccaccgtgcagggtctgcagcatcggggtttcgacctcgaggaagtcgtgatcgtcaaaggtgcggcgcagggaggccacggccttggagcggttgcgcaccatgttgcggatgttctcgtccgcaatcatgccgatgtacggcttgcgggtgcgggtgtcttcgttcaggtccttgtgcagggccggcagcggctgcagggccttagaggcgatagcccactcagtggcgaatacggacagctcgccggtcttggaggcgatgacgcggcccttgaggtacaggtgatcgccaaggtcgacgagctgcttgaactgcttgagcgagtcggcgccaatctccttcttggagatcatgccctgaatcttggtgccgtcaccggcggacagctgcacgaagcacaggccgcccgcgttgcgcaggaacagcacgcggccagcaatgccgaccatgtcttcggtctcttcgccagcctcgagcttgccgtcatacttggcgcggaccgcctcgatggtgtcggtgacgtccaagtgcaccgggtagggggcaatgccggcctcaagcatcatcgcgcgcttggccacgcgcatctgcacctgctcggggtgggccagcgggccgaactccttgttggaggggtccacggcttcgtccagcgtggcaccggacttgatcttctcgcggatggtggcgtcctgcttgagcagcatttccgcacgttcgacggtgctcatctgcgggacggccggggtttcattctcagtgttttcggtattttcgacaacttcagccatgattcatcagtgtacgcaaggccggcgattatgagcccggcagaccgcacggccatccgaacacccgctcacatgacgcaaaaccggctctgcacaaggcttgagagacctgtacacatggcgaatccaccatcacgcaacactcgcgacatgccgatttgcattgtccaccaccacaatgtaatatctacgtctgttgccaaacgggctgtagcgcagcttggtagcgcgcttcgttcgggacgaagaggccgcgggttcaaatcccgccagcccgacaactggaccggattgttgagaaatcagcaatccggtttttcgtttcctgtcccaacaatcaaaccaagcgatcgaacagcggtaaacaacccgccgcacacagcgacaaaccacatcacggcaagcccccgtatttgttggcggaccaccgtaatatatcgctcgaatcaatcgattgccgcactgtttttgtaagtaatactgaagtagttagaggaaccatgaagaagagtctgcttgcactggcttcgggcgcgttcattctcggtgccgccgagttcgtgatgatgggcattctgccgcaggccgcggccgccaccggcgtggacatccccaccgcaggccattacatttccgcgtatgcgatcggcgtgtgcttcggcacactgattctggtattcggccgcaaggtgccgccgaagaacctcatcatattgtttatggtgattgccttggtgggcaatctggcttccgcattctccgtcaatgccgccatgctggtcgtcgcacgattcgtcgccggcctgccgcacggcgcattcttcggcacagccacactcatcgccaagactctggcggagaaaggcaaggaggcgcaggccgtatccgtgatggtcaccggacagaccgtggccaatatgctcggcgtaccggcgggcaccttgatggccgagttcctttcctggcgtcttgccttcggcattttggccgcttgggcggcaatgacgattgtgctggcgttggcgtggattccgtacgttgcaccgattaaggacgcaggcatcgccggtcagttcaagttcctcacccgtcgtggcccgtgggtgattttggccgccgtgttcaccggcaatgccggtgtgttctgctggtggagctacgtctccccttggctgcagaaaaccggcggatggtcgtcttccctggtgccgatgctgatgatgcttgccggctttggtatggtcatcggcggtctgcttggaggtcgtctgaccgaccattggaggcatgccggcgcggccgcaataggtcagtccatctcctgcctcggcttgttgctggtgcttatcactccgggtaatcagccgatgaccgctgtactgacgttctggatcgccatcggattgttctttacttccgctccacagcaattgctgatgaccgaagccggccagggcggcggcgagctgatcgccggcgcggctgtacaggtggcgtttaacttcggcaatgccatcggctcgattgtcggcggcgcgatgctcaccaccttctcgatgaactatcgctataccggcctgggcggtatgccgctggctctgcttgccgtagggctgctggccttctactcgtggcgctgcgaaaccgataccgacgccattcaccgcatgcgcgaaaccaaggtggactgagaccaagctcacagcaaactccctgacgtgtttgttcacagtattaatagactgaaatcagacacgattcagggaggtctggcggtatggatgaggaagcactgctcaaacaattcgccgcgcaattcgcgcatggtccagacgatgccgacgacaccgatgcggcggccgcagcacaaggttccgattctactgcgaaccaggccacggacgatgccgatcaatcgcccgcaacctttgatacccaacaattcctgaacggactggacgcgattttcgatcgccacgcggccgccaccgaagccggaccgtacttggaacaggcgatggtggacgcggaaaacgccggcgacgaggccggactgctcaccgtgctcaacgaaacgatgggcttctatcgctcgcagggccggcacaaggagaatcagtggatcgtgcagcgagcgctggaactggccgctcgtatgggcttgaccaccggcacatccgaggcgtgggccaccacgctaatcaattgcgctaccgcgatgcgcgcggcccaacaatacgatcaggccgaggatttgtatcatcaggcgcagagtgtctgccggcattcgctggcacccaccgaccgtaggctcgcagcactgcacaacaatctgtcgatgctctacagcgagacgaatcggcccgacaaggcggaactggagttgcgtgaagcgctgcgcattatcgaagcctcgagcgtgaacccggacgcggatatcgacgtggccagctcgcacacgaatctggcgttgaccctgctgcccgaacacaagttggagggcgcgcattggcatgcagccaaagcgctggaaatctatcgcaccggccatctggaacattccgcgcattatgcctccgcactggcgggcttcgcgcaggtgtgctttgccgagagacggtatgcggatgcggttactggataccggcatgcgctggccgtgatcgaggaatgttacggcaaggacaccgattactggcgtatcaccgccgacaatctgcggcaggccgaggaagaggcggcgaaggctggggtgacggttgacaatgcgggtgttgccggcgatgcaggcacgccaccccagtccggatcgcggctgccggacagcccggcacagggcaagaccggtgcggacgcgacatcttccccatccaccgtttcggtgtcgaccggttctgcgggcgcggccgaggccgtttccgcatgcccggtgtccggactgaagctggcccgcgcgttctggacgcagatgggcaagccgatgattgcggcgaagtatccgcagtatgccgggcgtatcgccgccggtctggtgggccatggctcggaatgctacggattcgatgatacgtattcgcaggaccacgatttcggcccgcgcttctgcctgtggcttacggatgaggattacgcggccatcggcgagcaacttgaggccgattacgaggcactgccgcgcaagttcagcgtggatgcgcaaggccgcgtgacgttcgaggcacatgccagatccgatgcttccgggacattcccctccgcaggtgcaggctcccccgtcacgccgcgcgcacagggcgcgaatcgccgtgacggcgtgttccgcatcggtgacttctttgagtcgatcaccgggtatcgcactgcgccggcgcagaccgcgccgcatgagtggctaatgcttcaggaatcgaccttggccgccgccaccaatggcgaggtgttcgccgatcccaccggtctgttttccaagacgcgacaagggttcaagaacatgcccgacgatgtgcggctcgcgctgatctccaagcgactcggcatgatcgcccaggccggtcaatataatctgccgcgttcgttgaagcgcggcgacggcgcggccgcatggctgtccatccacgagttcgtgcaggccaccgcctcgttggtgttcctggttaacgtgccgatggtggtgggctatatgccgtattacaagtggcagttcgcggcattgcgcaagctgtctggctcgatgttcgcgctgttgccgaacgtgggcgaacagttggaaaccgtgatgcgattgagttcggcagcctgctatggcggggccggattcggcgaaggcggcaagggcgcggctccagcaatcgagaaaatcaacgatattgtggagcagattgcggtggatatcgtcaaggaactcaaacgcgaacacctgaccacgtccggcgagaccttcctcgaatggcagcgcccgtatgtcgaggaccacatcgcctctgatgatccggtgcttaaaagtttgtagattcaagctccctctgccacggcttcgccgtaccacctccctcatcagagggaggtatcagtgaaaggaacgtcgatgaccaacgaactgactgatgatgaactgcgcgaggctattgtgcgccatgaatgggatcagttccagcgcaccaacaatgagggtggacgcgcggcatgccaaggcaactggccggtgttccaccagatgcggttggcccagttcctcgcatgggagcggccattactcaccagctatgccgctgatcttgacgcggccgaccacgtgagccgcaacctcgtgaccgaaaaatacggccgcatgatggcctccaccgcaccggaaaatttcacgaagaacatagagccgtatattccgcgtctctctgaagagcgcgtggcccgtcaggaacaggtcatcgcccagcaggtcgcctgggccaaggatttccgcgagcgctaccccaagctcggcgaggcgatgcgcgtactcaccaccaccgaagacacaccatctgccacctcattcgaaacctatctgcgcggcgagcttggtacgtattccgaccagaccttcgaacgttacgaagcgatgattggcgagcgcgccgcagccagcccgcaacgcaatatcaccgaggaaaccttgttgcacacagtccagctcggcggtttcgacaccttagaggaggccgaagcctcccaagcgtaatactcagccattcactgtgtatcggacaccccgactgatgtacgccggccggccacacccaggccaacgcaatctgccgatcgtcccacacccagaccaccaacgcagcctgcccgccaggccccatttaccagcgcacatcggcagaattacagcgagaataggccccaaaatgccagtgtcatcagtgtggtgagagtgccgagcgctaccatcacgcatatgacgcgccgcgcaccgacgatatcggcgcggcaataccagacacgttccatttcccaagcaaacagcaccaccaacagcatggtcgctattcgcagcaccacccatccgacggcaaacagccgcggttgaggcataaccaatacagccgatacgcctacggcgcccatatagccgtacaacagcccagtaatcaccatcaccgctgtgccgataccggcagataagccggcaatgccgtgcaacatgcgccgctgggcggcccccagctcactcggcgtcgcatgcacggcccgcacagtcgccacactacgtcgcccggccagcaacgtctgtagccaagaaaacacagtcaagccaatacctaatatcgccgccatcacgatcagcacgggccctgccaccatcagaccggccagcacgccaagcgagccgacgataccggatctggtacgttgcgacgcggcgaagcgctggtgaggtgttgcaccggcgacttggggcgttgcccatccatcggctttggttccggcagtcacaccgttcacccaattttccagcgcttgcgtatagccttcggccaatggcaggttcggggtgaataagccctcaccagcccgcatctgatggttgccggcaaaatagcgtacggtgacgttctcgttgccagacttgttggccgtagcgatgatccgctgcgccccctgttcgatgggcatggccgtatcgtaggtgccgtagttcaccagcaccggcatggtgagggatttcagataccggtcggcatcaaagtcggcataggctagatcaaatggcgcgtagtccagcgacatcaatttggccatgtctttgaccacgggcttgggtgcgccggcctcatgcgtataggcgctgacagccatggccatttgctcacgtccattgaacaccggtgcggatgtaagtatggcaaaggcaatgtcttgccgtttcgaggttagaatcgtggcgatccaggtgccttcggattcggcgtagacgccggttttggcggggtccacgccgattctgccacgcaacacgtcgagcgaacgcccgtattcgcgagcaaaacgcgggtagtcgcgatgcagcacggtgtagttgtcgttgcgcttggccggcaccaaggtcacgataccggcagaggccatggcgttggcgatatcgccgaaatcctcggcaccgctggtaccggacccgtgaatgaacagacaagccgggcgtggcccgggagcgtcgaccggttcacgtagtacggcgggtagcgtgatgccgtcgccggtcttgatggatagtcgggttttacgcgtacgatatcgcccctcgtggggaatgttcgcatgggcaggggtgatggtggtgtcggcagaagcgataacgatgtgcttggtgtagggccgtgtgttccattgcggcatcatcgcccagccaagtgtggcgaataccagcgccatcgccatcgcggtggcgatgacgctcgctacccgccgcaccgaaatccgcttcatagttactatgcctcccccccatcagcatagaacagtcggctcttatcggtcggctcccgtcataatgtgcttctactgggaccgtaatgcaatggtttgtaacactattttctcttcttgacggcaccgactatggcccatacaacggccactattaccagaatcagtcccactacggcgcaaataatagccgtcagcaattgcggattcggcgagaacagcgaaatcatccgatccggagatatgtacccgaaaaccagcgcgatcacgccgataatcacgcctaatagtccgaataccacagtaggcgcgctggtgctctgtttctggatgttcttggcattctggacatccttagcattctggacgttcttggcgctccccccaggctggcatggtttgccggcggtctgagactgctcatagggaggtcgtgctgaagatgctgcgtacatcggcacatcatcggcagatggaaccggcccaccatctccctccacggcatcggcaactgtttcctgggcaatccgatttgtggttggttcgatgggcgatggagaggcagctgttgcctgcgtatccacatccgagaccgacgcacccgcatgattgtcggggacgggcagcacagccgtttcgtcatcatccgctgcggatggcagcaccgtggtatcggttcggtcatcgacggtcaccatggttgttgtcgcggtggtcgcgtcggtttcggaaggtatggccgtggtcggtgtcgcatcctcgatggaggcgaattccttggtttcatcagtcatgattccatctcctagttgcaacggcttgatcattccgattgttcggttgtgttcttgcttgtactgttgccgtcgtatatatcggcaagcggctggaacgtagagccttcccaatcggaggcgtacaccacgttgacacgtgcttccaccacatagggaatattgatttttaattctgggccgttgtccggcatggcggattccttatacaaccattcgtgatcaggcccattggtggcactttcagcttcgaagaaaacaaagcttggacccatgtagttgttgtataccatctcgtatttgccgccaacgtcactcgaagtggagtagtaggagtcggcggtgccgaaggcgtaagtgcaggaatccggcagaacgatatgcacttgcgcctgtgttgcggctatggtgatggtaccgaccgggcaattactgatggaagttttgccatccagcatcttcaccgtgtgcggtccatgtgtcttgtcccaatcggaccaatcaatgattgcctgatcggtgttgtagttttcaccgctgaacgccacaccttgctgcaatgtttcaaacgtggcatcgctggcatcggcaacgaagatgccatccttttgcacatcgttcatgccgtcgctgtttctcgcactgacagattggctcagtgaaacaacagtattgatgccgctggcaccaagatcacggtagtacacgccatacgtgcctgaaacgatggtcatgcagagcgcgcatccaccggcaaccagtccgagaggaatcagaccaccggtacgccgtcctctgaatccgagaatgatgaccaccagccccatcactatgcatactgcggcaatccagatggtgctcagacgcataatgccgataatgcccatgtcgtttacccaaatcagtcccatcagaccggcaaaggagaggaaggtaaggcccagtatgctcaagaccacgattgggcccgccggcttgcggcgcttggactcggtgggggcataggccgtcgcattcatacggtcgggggcaaacggcccgttgggtactgtgccgggcatcgcgccgggcacagtacccggcatcacgctgggcatcgactgatagacaggctgtgaaacaggctgtgaaacactaggcgcggtttgtgaaacaggttgtgaaacaggttgtggaaaaggttgcggagctgaatacaaaggagattgaggtactggttgcgcggctggatatgagacaggctgtggagctggatatgacacaggctgtgaaaccggtcgcggcgcagatgccccgaatccgtacccttcctgctggcgaatgccgcttttggccaacagccatagcgctaaggcggcgagcgcaatacaaccccaccccgcacctggaatcacgattgccacggcgaggaacaggaagcatcccagacaattccagtcccattggccggcaatgaggtcctcggccaagatgtgcccatcgcgtacatccggcatcagaaaccagccgaatgcgtacagagctgcaccaaaaccgaagaacaatgcacatacaatcaccaacgcacgtactaatgtggggctccagccaagccgtaaagcgatgccgctgcatacgccgccgatccaccggtcgtcgccgcgaaccagtccactggatcgcacccaagtgaagaagcgtcgcgatgtcttgtttttttgcggaccaggctgcggctgtggctgatatggattcgcgtttggattgctcatgattccattacaccgcccgatcactgccacaacgctcggggaacaccctgattgttccctgaacaccgggtaaaaccccggccgcaacgccctgagcgcggcacaataggagtatgacgtcatctcccgaaccattgctgcccgcgcgcatgccgttgatgcgcccccggcagggccgttggctcaccggcgtgtgcaagggcatcgccctgcacttgggcatcggcgtggcatgggttcggattgcgttcatcgcactgaccgtcctctacggcgcaggcatcatcgcttatgtattcctgtgggtgttcatgcctgccggagacccggtggcggctgcggctcgcacagtgcccgttgatcaggcgccgcttgcgcgaggcaatcagccacttgccgctcatgacgacgaatcggctgccgcaccggaatcattgtccgaggccatccaacgtgctccgaaaccggccgtcgtggcattggccggtttcgcgttgatggccactggactgttgctcaccagcaccggtgcggatgtccagattgtgtttccgctgctggtagggttgggcggcatcgcactggcatggatgaatcttagtccgcgaggcacgcagctgttgtctatgttgggcggcatcgcactgattttcatgggatgggcattgtatgtgcataatgtcagcattcctgggtggggcacctctcctcgacgcattgttgccagcggattcgtgatgatcgtcggtatcgtggtggcggtgatgccgtgggcgaacgcgatgctgcaacgactcacccacgagcaggcattgaaggagcgcgaagaggagcgcgcggacatgaccgcccatctgcatgatggcgtgctgcaaacgttggcgctgattcagctgcactccgaggaaccgaccaccgtattcgccctggcgcgtagccaagagcgcgagctgcgcgaatggctgtatcaggaacgttccacatcggatcgttcggtgggagccggattgaagcagatcgccgccgaggtggaggacgagcacggcaagccgattgaggtggtcaccgtgggcgacgcgcggccgagtgcccagaccgatgcgctgctggacgccacccgtcaggcgttggtcaatgcggtcacgcatggcggcgagccggtgtctttgtattgcgaggccaacgacacgatggttgaagtgttcgtgcgcgaccatggcgaaggcttcgatatggacgccattccgcccgaccggctgggcatccgcgaatcgattatcggccgcatcaaacggcgcggcggtacagtggagatagtgtccagggccggatggggcaccgaggtcagaatgcatatgccgatcgcgctgaaagcggcgcagggagaacatcgatgagcgagaacgagacagccaagattcgtgtggccgtggtcgatgaccatgagatgttccgtgcgggcgtaatcgccacgttgcgtgattccttcgatatcgtcggccaagcggcggacgtgcccggttcggtggcgatgatcgcacagaccaagccgcaggtggtgttgctggatgtgcatgtgcccggcggcgagggtggcggcggtgccgagattctcgccaaatcgcggccctactcccccactaccgtgtttctggcattgtcggtttcggatgcgccgcaggatgtgggggcggtgattcgcgccggcgcccagggctatgtgaccaagacgattaccggcgctgatttgatttcatccatcaagcaggtgcatgagggctatgccgtgttctcgccaaaactggccggttttgtgctttcggccttccagggtgtgccggcggcggggtctgatggcggcgctgatggtgcggcacgggctcatgatgaggagctggaccggctgtccgcccgcgagcaggaggtcatgcggctgatcgcgcgtggttacacgtataaagaggtggcggccgaactgttcatttcgatcaagacggtcgaaacgcacgtgagctcggtgctgcgaaagcttcagctttcgaatcgcaccgagctcacccgttgggccgccgataggcgcattgtgtgataaacgacagatgagctccctcatcagagggagctcatctgctcatatcactccgcgtcgcggaaaccgttggggttcttggtctgccagttgagggaggaggcggccatgtcgtcgatggtcagctcggccttccagccaagctccttctccgccttggaagcgtcggcgtagcaggcggcaatgtcaccgaggcgacgcggcttgatcgcgtacggaatcggatgaccggcggccttctcgtaagccttgataacctcaagcacggagtagccgtggccagtacccaggttgtagacgaacacgccttccttgtcgatgtggtcaatgacggccacgtgacccttggccaggtcgaccacgtggatgtagtcacgcacaccagtgccgtcgggcgtgtcgtagtcgtcgccgtagacctggacttccttgagctcgccgaccgcgaccttggccacgtacggggtgaggttcgccggaatacccttcgggtcttcgcccagcaggccggactcgtgcgcgccgaccgggttgaagtagcgcagcagcacgatggtccaggacggatcggccacatgcacgtcgcgcagaatctgctcctggaacagcttggaggtgccgtacgggttggtggtgccgccggtcggagtctcctcggtgatcggcagttccttcggcgtgccgtacacggtggcggaggatgagaagatgatcttcttgacgttgtgcttcttcatcaccttgagcagcacaagcgtggagtacaggttgttgtcgtagtattcgatcggcttggccacggactcgcccacggccttgagaccggcgaagtggatgacccagtcgatgttgttttcagcgaagacgcgttccatgagcgcctcatcgcgcacatcgccgtcataacgcttgaccggcttgccggtgatttgctcgacgcgctcaagcgccacgggcgacgagttgccgtagttatctacggaaataacgtcgtagcccttgttgagcagttcgatgtcggtgtgggtggcgatgaatccagcaccgcccgtaaccagaacagtagtcatatttcctcctttggaaggacttgccttcggtttttccttcagtattgagcttacttcacttgacctgtttcacctagcggcaaaaccaaggctttcgaggaatgtttgcgtggtggctttctgcttgaagacggccgtgttgccgaggatgcggtagcagacgctgccgagctcgtcgtgtacggcttggcggatggcctcgcggtcgtggtttccggccaacgtttcagcgagttcgccccattcgagactgaattcgctgacttcatcgggcaaatcgcggccttcggcgagcgcctcttcgacaatgccgagctggtcgacgagccgtccgggcagaatgaacaagccttgggcctcgatcagtccgatcggctcctgcttgaccggccagtattcggggtgtgcatggaaaataccttccgggtactcgtcgctgatcgcattgttgcggaagatgagactcatctcatagccgcgttcggtgatgatcgcgctgggcgagagggcggattggcggttgccatccgcgtcatggctggcgatgccgttcgccgcgtcgtcataaccgacccatgcctcgcggatgatgtcggatacgtcgatgatgctctggcgactcttcgacaccacgcgcacggcggtgccgggccagtcaaggatttcaaccacggcgtccggatagtcggcaagtgtgaaggcggcccaagtggcggccttgtgcatcggcagcagttcgccgccgccctggtaatggtcatgggcgagcaccgagccgccgatgcgaggcagcgcggcgttgcatccgaggaagtatccggggaaacggtccacgaagtcgagcagatggccgaaggtgtcgcggtccacatgcatcggcgtgtggtcggtgttcacgcagatgccgtgctggtcgaagtagccgtagggcgagaactgccagaaccatgactcgccgccgagcgtgaccggcaaggtgcgcagcgtgcgcttgtcacgtccggcgaagccctcgttctcatggcagatcgtgcacttcgggtagccgccggccacggcgttgccggccgccgccttcttcatgttcttgaattcgggtttggcgaggttgatggtcaccgtcagcccgtgcgagtcgaagcgcgggttccggtcgagctgggcacgcttgacataattgttggccacacagtagtcgtagaaccattgcatggcggccatgccgccatcccggtgctcgacgagcaggaatcggtcgtcgagatcagcggggttggcggagaggatgcccatgatggtgtcggcgtaggccgggccttcctccggcttgaaaaggccggcggttgtggcggcggcgcggaaggcggcgagcagggggtcgggggtcttttcgccatagggggcctggcttcggctgccaacaatgtcttggactacgtctgacactgacgccgccgacgttgtggttttgggtccggggtaggaatctaggcggaagagggcgaagatttggttgcgggtccagtctgcgttgcgtgggtcaaggtcaagatgggccaaggcataatcgatcagggcgtcgatgctggcgtatacctcggtcagctgatcgttcattgcgctgcctccatcatgctggttcgggtatggttcggctgacggctcacctggcagcctccatgatgtcggctacgatggcgcgggtttcgctggccttctgctccatctcctgcacgagtttgatctgggtgcgggtgcgcaccagattatgctcggggtacttggtggcaaagtagatatcgccttccaagtagtcggcgagaaagcgcatgccgcactccatggtgagcaggttgccgctgaacggcagcagttcggcctcgcgcgcggtgatgctgccgcgtagttcgcccacgaagccttccgtgtaggcgcggaacagctcggtgctgaaatgcaccttgctgaggtccttttcgtcttccagagcagtggacgcaccaaagcgtatggaatcgccgaagtcgaacagcatggagccgggcatgatggtgtcgagatcgatgatcgcacgcgccttgccggtggtggcgtccatgaggatgttgttgagcttggtgtcattgtgggtcacgcgcagcggaatcgaaccgtccctgagcccatccatcacgacggcatactggtcggcgtgactcagatagaagtcgatttccggctggcatgcggcggcgcggccgagcttgtccgcggcgagggcggccttgaagtcctcgaaacgatgcggggtgtcgtggaagtgggcgatggtttcggtcagctggctggcgtcgaattcggacaggaagttctggaagtcgccgaatgcgctgccggcttcgcggaacacgtccgggttcggcacgaggttgtaggacacggtgtgttcgatgaacttgtagacgcgccatgcgccaccatcgatctcggcccaggtggcgcctgaggtggtgggcacaatgtccagcgtctctttgccctgagccttgagagtggaggtgaccagttcgacattgcgcatcagattcaccgtatcggggaagatgctggtgttcatctgctggaggatgtagcgggggccgtccgtggtcaccagataggtggtgttgatgtggccgtctccgtaaggttcgataccggtcacggcaccttccagcgcaaaatgcgaggcgatgccgaataaaacttcattgctttcagtcatgatgggtccgttctccaaaacgcgggatcaggcttcacgccaggcgataccgctgtcaggcaggtcgaagtcctcggtggtgccgtcggccaaagtcaccgtggtcttctgcggctgatcggtgttgttgattacgcaatacagcccttgctcggggaagtgcgccacttcgcattccggattggacgagctccaggccgcatacttgtcttcgttgtgggaagcgtagaacagcacgcgttccagcagtcgggcgttggccgccgaatagggcaggccggagatgtacacgccgcggcccttgccataatcgttggtcgcgagctgtacctggccgccgtccgcgcgcagcagggtcacgttttcattgaccggatacgtgttgagcacgggttcgccgaaatcgatgccgcccaacggcttgatggactggccgccgccgcagccgctcagcgggatgcggtagccggcctgctcccaagcctcgcgggccgccgggtcgaccggcacatcggcggtgatgaagtggtccggcaccaccggcgggaaatacttgtccaccgaaagggtctgatagcgctcctcgtccacgccaatcacgtcggccagctggaagaaccggcccgtttggaagcgcggtgccgagctcggctcgcccacgcccacgaacgcgccgccgccacgcacccaggcgcgcacggtttccacgagcttcgggttggtccacacgtcgccgccggtgaatgcggtgtcgaccgggccgccgttgatgattacgtcgatatcgctatcgatgccatgcgcgagtacgtcgtcgaagctgatgaaccgcacgttcacgcgcatgccggacagggattccagaatgccgtagtaggagtaggtctgcttgttgggcagggcgtgtgccacggtgaacgccatccaggagcgcatcttgccccaggaattcagaatcgccacgttgagctcaccttcggcggccaccccaccggtgcggtcgtggatgtcgcggaattcgttggcgatatgggtcaccgtgtccacgaacttcgggaacttggcggccagggagaggtagccgccgtagcccatgcggctgatcggcgagcgcaggatcgcgcggcgggccttgcgccagttgtcgaggccttcgatgctcggatcgttgccctcgtagaacgtgtcggggaagaagtacggcaggaagcggccttcggtgtacttgacgcccggaatatcggcgatcatgcgggtggtggtgccgtcgccgatggaaccgaccacggcgtccaggccgagttcgtcgaatccgtccttgtacggttcggtgccgatccactggtcgccgaggaacatcatcgcctctttgccggcggcgtgggacatgtcggcgagctgcttgacgttttcgcgcacgaagccggagaggaagtcgatccagtcgcgctgggcttttctgggcacgcgccatgcggagttgtaggcaccgccgtccacgaagtcctccgggcgtaggcggtagccatacttggcttcgaaatcatccagcgcacgcgggcttacggtgcaggcgcaaccaaaccagtcgacgaccttttcgcggcgcttttcatcgaacaggagcgtgaactggtagaagaacgtggtgaatcgcaccacatcggtctgcgggctgtccttaagccactgctcgaacgtgtcgaacacgaacttgcgggtggccggatggtagatgtcgaacgggatctcgtgttccttgtcgccccagtcgttggtcagatggttgtacatctcgaccgggtcccagatgatgtaggccaggaaactcaccgtgtactcatgccatgcggcaacgccgctcacatgcacggtgtcctcgtccgcgtcaagcgtccagttcgccgaatcgacgacctcgccggtggtgcggtctacaacctcccaatacttgtgagggtcggcatcacgattcggcttcagctgctcagcgaagaagctttccatcagcggaatatcaaccgtatccgattcggcgagaatgcgatcggtcagcagatacacctgtggcgtctcatccatatgcagcgtaatccactcgttatgcgcgcgagtcgggaaatacgcactgtaaatcttcttgcccaaggcaagcacagcctcatccagatgcgtgccatcggagttacgaatggcgtccgctccccacagttcggcaagctccttggtcttctccgcaaaattctcctcgctaggcaaggtgaagcggccggtgctagtcatagtctctcctttgaggacattgattatttttttggataattaaattgtaaacaatatatgcatataaaacaagaatccgacacaaccgtcgggcgtccaggatcctgactgtataaatccttgagagtagccccacggcaacgccggaagagcgaattgaacatcaccggagcttcccggtcagtttcaccgacaatctcatgacaagaatcaggaaggctctggatcggtatggttgcgtgctacttattgttgagaagccgtccggcgccggaaggagtagcacgaggcaccggacggcgggaattattggtcttaggctgtccgcttaacgcgtcgccttcggcccctgcaattaaggactcgcctacggcgagactcaatgctgccttcgctcggctaccgcctcgctcgggccgacgctacagacagcccaccgggctgtccgcttaacgcgtcagcccttgaccgcaccagcggcgaggccggcctgccagtagcgctggagaccgaggaagagcacgatcacaggcagcacaccgagcagagcacccatcatcagagcgccacgatcagtgaaggtagccagagagaccatgccgtacagacccaaggtcaccggcttcaaggtgtcggaagagaccatcatcaacggcagcaggaagttgttccaagtggccacgaacaggaacaggaagatcgtgaccattgccggagccagaatcctcaacacaatggtgaagaagatgcgagcttcgcttgcaccatcgatacgcgccgcctcaagcagctcgttcggcactgaggtctgcgcgtatacgcggcccaggaagaagccgaacggagagacgcagcacgggatgatgatggagagcatcgtgttggtcaggtgcatggcatggaagatggagtactgcggaatggtcagcagagcggccggcatcagcatgcagcccataatcacgccaatggcaaggttcttacccttgaagttgaactttgcggtagcgtatcccgccatcacagccacgagcgtacccaccagagcggaaacacccgagtagatcagggagttcagcacccagcgccagaactggccacgggtccaaccaatcagcgtgccatagttcttggcgatggcggcaggcaaatcgctcagacccacggcgaaccacagaccgttgctgccggtcatctggctcggcgtcttggtcgaggcgatgatggcccagtaaatcgggaacagaaagtagatcagcgcgaagaccagaacaacgatggtgatggtcttgaccagcgcggaaggctgcatggaacgaggcaggtcgttggcatgcttgtcgcgaatcctgtcagccttcttacgagcgcgtgcgaccgcgcgggattccttatcagtagcttctacggtgctcattctgcgttcaccttcctttcaacgagcgtgtagaccacggcgagtacgccagcgatcagtgccataacgatggccacagcggatgcaggtccgtcaccacccggggtcagcgtgccctgcgaggtattgagggccatcatcattggcgtgtacgacttggaaatgctcggatcggaaatcgacatcacctgcggctcgttgaacagctggatggtgccgacgatggagagcagcatggcaagcagggcggctgcacgcacgttcggcagcttgatcttcatggcgatctggaagccactggcgccatcgatgcgtgcggcctcgtacagatcgtgcggaatggcctgcagtgcggcgaggaagatcagcatgttgtagccggtgaaggtccaggtcgtgatgttggccatagagccgaggaccacattgtcgccgaagaagttcaccttgatgccgatggcggcaagtcccttaacgataggggaaatctggccgttgtagaggtacacccagatgatggatgcgaccacgcccggaatggcgtacggcaggaagtagctcagacggaatgcggtgatgtgcttgacgatataggaatcgatgagcattgccagagcaagtgccgcgatgatcatgaccggcacctgaatcacggtgtagagcactaccctgcccacgccagcccagaagttgccggaagtaataacgtattggaagttctgaagtccgacgaacttatcgaccagttccccgccgccgtatgcgccaccgcccgtggtgacctggcggaagaagctggaataaatagcccaaatgatgggaagaataaataccagagcgaacaggatgccaaacggtgccatgaaggcccagccggtacgattctcacgcttcacagcatcagaagcctttggcttatcggcacgcctggcgacccccgtcttcgccgtttttgttgttgcagtcatagggaaacctgtctttcaaaagaacagtgagaaatagaaagtacgtaatgcagttcgaatcgatgcagtcagatcaaacacaattaatgacgaaccgaactcgagtaaaaggaaaggccggagtgttgagctccggcctttcgatgtgtggttgaggatatcagcggctggaaggaaccctaaccgttaatgtcactcggaaacagacaggccgaagttcttcagcgtatccacagaggtggtctgtgcgtcggagaagatgtctgcaaccttgccggagccatcggtggccttggcggcggtttcgttcatcttggcggcgactgcggagaagccaggcatgtaggtgaagtcacccatgttgttgttagcggtcttgaattccttcatgatgtcctgaccaccgaagaaggtggaccactcggaaggagtctcagcgtcttcagtggtagcagccggcacgaggccctgggaaaccagatcaggaacctgggtgttgaaccaatccaggaactccattgcttccttcgggtgcttggagttcttcagcacggccacggcggaaccaccgtcagggccggtcttgccagcgttgccgaaccagtcaccgagctgagcgacctgccattcgccggagccggtgccaccggaggaggtcatgaacagcggggcttcccaagcggcggccacagtaccgatcaacgagccatccttgatggatgcatcgaaggacggatcccaacgcgggttggtggtggctgccttggcgtcgagcagctgctggtagaagtcagcggttgccttggagccatcggtctcggtgttgacggcccaggagtcgcccttcaccttgtaccaaccaccggaggcgccagccagaccggagatcatgttgccggcctcatcaggctggtaggacatgatgtacttgccagcggcggcagcggtcttggcagcggcgataaactcatcggcggtctgcggaatctcggtgatgccgagcttctcgaactcagccttgttgtagaagtaaaccagcgggccggtgtcctgcggcaggccgtaagccttgccgccaacctgaaccaggctgtacgggccggatgcgaagtcgttcttgtactgctcggcatactgggtcacatcctgcagcagacccttggtgaagacctcaggcagctcggcgtaaccgacctgagccagatccggagcctcgccggacttgacgtcggtctcaagcttcttgatcatgtcagaggccttaccatcgaacttggtggccttgacctgaatatccggatgctgcttattccacttggcaacgatgtcgttgaccagagtcatgccctcggaatccggcagacggtgcatgtaggtgatgttgaccacgccaccatcatcggtggtcttcgtgtcgccggcagtgtcgctgccgcaaccggccaagcccattcccattgctgctaccgcggcaaaagcagccacgatgcgcttattgcgagataccatatctctactccttcgtagtgaaatcatcatctcagtgtgatgactgattactaacatatgccctcattcttttattgtcaacttagctaacaattaccgcgcgtcccgttgaggcgagtagcattaaaccggttcgatgctcgattgtgcgagtttgttcatttcattaactccccttacaaagcaacgtacttttggtccaccggtaggcctaatgagatattggatagcggcaacaatccaagacgttagcttgcaatcgtccaccgcaaattgcaagcacttgccaacattatcggttttcaggtcgccggcgcgatacccgaccagggggcaccgcaccttaatgagacgctacacgagcagtctcagcaactggtagagctgccacaggctacgcacgttgaagtgcgtgccgtcaaccgtggcgttcgcctcgccatcgcccatatggacgatcacggtgcgcccgttcacggtcagactaccgtgcatcgtgatatgattcatcttgcaaccttgttgattaaaggcgcaagccggtaatcaacgcaaaggcccgatgctgcaaacgtcgggccttttcttatcggctcacgccgatcggcccgtcatatcaacggggacaccgcatgttacggcatcacaaaccaatatatcagcaccccggcggcaatcaagaagacaggttccagaaaaagaaaaaaagggcctgggcatgttgcccaggcctcggttcgcggacagggcgagattcgaactcgcggagggttgcccctcaacggttttcaagaccgtctctttaggccgctcagacacctgtcctgatgcgcgttcacacgcgcaagtattcattatacagaagggagggatgttgatattcggcagtgcggtcggtcttggattcgcctgctggctatcagcgatctctccctcagtaatctctccctcagtcagctacgctgacagctccctcatcagagggagctaaagcacgatgagactcaggcctcccacttcgtgggctcgataacttccttgccgcccatgtaggcgcgcatggccttcgggatctcgatggagccgtccttctgctggtggttctccatgatggcgaccagccaacgggtggtggccagcgtgccgttcagggtggagaccgggcgggtgccgccgtcttccatacgctcgcggatgttcaggcggcgagcctggtactcggtgcagttcgaggtggaggtgagctcgcggtaacggccctgggtcggcacccaagcctcgcagtcgaacttacgggcggcggaggaaccgaggtcgccggcggcggtatcgatgatgcggtagggcacctcgaccttggcgagcatctcctgttccatggccagcaggtgctcgtgctccttgtaggagtcctcctgcttggcgtaaacgaacatctccaccttgtcgaactggtggacgcggatgatgccggaagtatccttgcctgcggcaccggcctcgcggcggtagcaggaggaccaaccgcagtagcgcagcgggccgttgccgaggtcgaggatctcgttctcgtgcatgccggcgagcgccacttcggaagtgccgaccaggtactggtcatcgggctcgcgcagacggtagatctcgtcggcgtgggagttcaggaagccggtgccgcgcatgacctcggggcgcacgagcgtcggggtgatggccagcgtgaagccgtgctcttcggcctggtccacggccatggtgagcatggcaatctgcatgcgggccacctggccacgcaggaaatagaagcgggagccgccgaccttgacgccgcggcgcatgtcgatgccggccacgccggtgccgagggtcaggtggtccttgggctcgaagccttcggccgcgaagtcgcgaatctggccaaccttcttgacgaccacgtagtcatcctcgccgccttcgggagcttcgggctccacgatgttggagagcttccacatggcggtggtgtattcctcggctgcggaatcggccttggacttgtattcggagaccttctgggacagttccttggtttcggcgatgagcttggccttctcgtccgccggggcggaggcgaccttcttgccgatttccttctgctgggcgcgagcctcttcgaaggccttcagcgcctcacgacgtgcggtgtcggaggagagcacttcgtcgacgagctccacggactcgccgcgcttgcgctgggattccttgacgatatcggtgtgttcacggatgaattgaatatcaagcatgggcaccagactagccgcgtaagcagacaccgacaatggccgaatgcgcgggagtcacgcggaaatcacagggaagcccgggaaagtccgcggacgggtccacccggccaatttcgtcagatgagacgcgattgaaccataatcacgccccacggggctgttgcgtgcaggaaatgttcacgtacggcgcaccatggccgcaaacgacctccccaccgataacaataggagccatgcctcagcctgccctcaccgtgtttctgatcatcgccgcaatcgccattgtggtggtgctcatcgccgtcatcgtcatcgctctgcgcgcgcagcgccgccgcaagctggctcagacgctggagaagcgccgggacgacgaggtgcagtacgccttcatcgtgaatccgtccaaaccgcaggccgaagcccgcaggctgcatatccagaggttctgcgaggccaaggggctcaatcgcatccgcttctacgacacccagcttgacaaggacggcagggtctgcgcgcttgaggcgctggaggacggcgccgacgtggtgatcgcggtcggcggcgacggcacggtgcgcacggtggcgagcgccgtctccggcaccggccatgcgctgggcatcatccccatcggcaccggcaacctgtttgcccgcaatatgggcgttcccgtggacgatatcgacgccgcgctgaccgtggccacctcccacggctcccgcctggtggacatgggccgtctcaccctgctcgaccacccggaggacgaccacggccacgccttcctcatcatcgccggcatcggcttcgatgcggccatgatcgacgacaccaaccccgagctcaaggcgaacatcagctggctcgcctacttcgtgggcggcgtgaagaacctgttcgcgccgaagttccgcggcacgctgacagtcaccagcgccgacggctcgacccacaccatcaagaatctcgatttccgcacggtgatggccggcaactgcggccagattcccatgttctcgctgatgccggcggcatcctatgacgatggtctgctggacttcgaaatcatcgacaccaccggcggcatcctcggctgggccaacctgttcggcgacgtggtgcaccagacgatcatcggcaagcccgaacagaacccgctgtccacgaactcgaccatcgaacaggttcagggcgtcagtgccgaaatcacattggaaaagccggccaaagcgcaggtggacggcgacatgctaccggagaccaaacatattcgtttctcagtggatcatcgcgcgctgatcgtgcgcgtacccgacgcctccgcgctggaaaagaccgcacaggccgctgcctcaaacgccacctcggatttcgccgaaatgaccggcacgctcgagccgattcgctgatccgctacgatgcgtggccggtgactcgggcgacgtgcattgccagataggcggtttcgtcgtcgctgatatccgtgtcgaggcgcagttcgagcagggaggcgatggttcgcgcgcatcgtagcgcggcgggataggactcacgaatcaccttcatcaccggtgccggctcatccgtcagttgctggtgctggtggatgcgtacgaacaggtaacgcagatgggtgatgaacctgcccacattcacggaactgcggtccaacgtgatgccgtagctgtggtcgataatgtcaagcagttgctggatcacgcccgtcatcgtatacgtataggacaggtcgccggtggcgaagccggcgttgaccagatgcatggcaagcgcggtggcctcgccgtccggcagcgtgacgtcgagccgcgcattgagcgatgcgagcatcgcacgcccctgcgcgtattcctgcgggtacaggttgctcacctcgccgagcagcgggtaggtaatgtcgatgccgcgccgcacccgctccaccgcattcgccacgtgatccgacaaggccatgaccagcgtggtgctgccggtctcacgctcccccagtccggcttcctgcatggattcgacgaccacgcggatgatttcgggcggaatgtccgccagcatctgcgccagatggtccgggtcacgcccgtccgacggcacgaaggtgcgcacgactttcgactcgtcgaccgtctgccccggcttggcctggaaccccagtccacggccggtgagaatcacctcaccgccgtcgccgcctttggcgagcacgacgttgttgttgaacactcgcagtatttccatggcatcctttcgcaacgtcattgttccacatcgatgatcgggctgccggctgatacggttttgcagtcaccgccgttgttgtcgccgctaccgtcgccgatcaacggcgtgaccacggtcagttcagcggcgttgaccaccgtcaccaccaccacaacgctgtgcccggccgccgcgactttgccgaaatccacggtggccagtggctctcccgccgcgatccgctcgcctttagccacgaccacagcgaatccctcgccatccatatcgacggtgtcaatgccgatatgaaccagcacctcgatgccgccatcggttttaatgccgaaggcatggccggttcgggccacggttttcagcatgccactgaccggtgcgagcacggctgtctcaccggtcgtctccggcacgacgcctacgccctcccccagcgcgcgggaggcgaacaccggatcgccagtcgcttccagattcaccagccggccggcgaccggcgacaagatggcgttggagtcaagagcccgatcaggggcagcccgcgatggagaatcttccgcagactccacatccgacacggtcgtgtcaatccccctcgccatatcctgcgggcgtgcgttctcgtctgccgagaccatctgcgtcttggtggcgcgcgacggcgtgcggtacccgaacaacaccgtcaacaccatcgccattacaaacgcaacggcgatggacagcgcgtacacccacatccgatcgaacaccggaatcgtcagcaacgaggagaaggcgaatgccgtagtcgtaacgccccggaccatctggccggatggcagcacggacgggaacagccagccgaacaccgcgctggtcactccgccggccgcgcagccggcgagcagccagcggtagacgcggcggtgatgcagatggatgccgtacaggctcagttccgaaacgccacccagcaatcccgcgagcaacgcccccaccgcggtctgccgcatggccgaatccttgccgcgtacggccagcacgagcacgccggcggtggcaccgaagcaggcgaagttccatacacccatcggaccttggacgaagtcgtagccgagcgtctgaatgttcatcagtatcagggcgttcaacggccagtgcagaccgagcggcacgagaaacgggtagagcatcgggatgatgagcgcgaacaggaatggcacgtgcgcgttaagccatgctgtggccgctcccagcccgctgccgagccatattcccagaggcccgataaccagtatggtgagcgcaaaaacgacgaccagtgagaggaatggcacgaacaccagctgtacgctgtcgggaatgacgcgcttcagcccgcggtagaccacggcgagcacggcggccatgagcaatggtacgaagatgttgccactgtagtcgttgagttgaatcggtatgccgaacgccgacacggtgcaggtttcggcgccgaatacggcggtggccgagcattgaatctccccggagagagcgctggatacggacgtcccggacattccggacatcacgccagtaagctgcggggtcataagcgcggccataatcgcaccgccgagccaagggtcgacgtccagtttcttggccgcattgtaagcgatcataatcggcagaacggtgaacacaccctcccaaatcgccttgagtagtatccaaccggtggacgtctcgccatcaggcacaatgccgagtgcaacgatcacgttgacgatggcgatgaccagcgaggcaccgagtagcacgcccagaatcgggcggaacgagtcggacaggtagtcgaaaaacgcggcagcccgggcacgggcggcactgccccactcgcggatggtacgaggcatgaagtgacgggatgtattggctgggccgtgactctgctcggtgtcggtatcgcgcaatggtgcgacgtcgtcggaaaggttcggcgcggactgcgtaggctgcgtaggctgagtggattgcgttgactgagtggattgcgttgactgagtggattgcgttgactgagtggattgcgcggactgcgttggccacgacgccgccgatggtaattgcgttgccggagtcaatcgcgctgcctgcatccgaacgatctgctcgtacaccgaggcgaccgctccgccgatgatgacctgataacgattgccggttcgcgggaatgcgccgaggactccggggatggattcgagaccgtgctggctgacctggccggcgtcgtccagttcgaagtgcagtcgcgtggcgcaatgggtcaggttggtgatgttcgcggagccgccgacggcatcaacgatgcacgccgcaatcactgcaggcgttgcgttcgatgcgttcgccacggttcctccttgctgccgtatgccactgtgttccattatcggcgctgggtgccccaaaagcacggcaatgccggcaaagcatcgcgaaacggcaactatgcgctacggtgctccgcgatagcgttccgctatggtgttccgccgcacccgttctccgtatttgccgcagcgcccattccgacttcattccaccatgcagaatcctgcaatcgttgtcaaaaatcatcgttttttgccgcctattcggagtgtcgcgaccgagaaagtcgtatcctatctttcacacacgttgcgtagcagggttgttactcaaaatgaggcaagacctggagtgacgtggaatttgcgtatcgtaatatgcgaattccacgttgttccaggtcttttttgttttcgggcgacttcaggcaatcgaagcctgaccttgcatgcggcagaggggccacgcggcaggcgcggcccgtcaacggcgaaaggacaaggcaatgacgacgacggcatcacccgtatcgaagcagacggcatccgcggcacaggagaccggcgcaaccggtgcagcggccaccgcaatcgaaaccatcgaaaccggcgtggccggggtggcggacgcggccacaaacgcggcagcaaacgcaatcgaggacctcgaagccgccgaatcacgcggcttctccacgcgcttcccgctcaacagcgcattcatcttcaccttcggcgcgctcggcggcatgctgttcggtttcgacaccggcattatctccggcgcctccccgcttatcgaatcggacttcgccctgagcgtctctcagaccggcttcatcacctcctcggtgctgatcggctcgtgcgcaggtgcgttgtcgatcggcgcgctgtctgaccggttcggccgcaagaagctgctcatcgtctccgcgctgctgttcctgctcggctcaggcctgtgcgcctcctccaccggattcgcgatgatggtgtgcgcccgcatcatcctgggcctcgcggtcggcgcggcttctgccctgaccccggcgtacttggccgaactggcgccgaaggagcgtcgcggctcgctgtccacgctcttccagctcatggtcaccttcggcattctgctggcctacgcctccaacctcggattcctgaaccacaacctcttcggcatccgcgactggcgctggatgctcggttcggcgctggtgccggccgccttgttgctgctcggcggcctgctgctgcccgaatccccgcgttatctggtaaacaagggcgacacccgcaacgccttcaaagtgcttacgctgattcgcaaggacgtggatcagacccaggtgcagattgagctggacgaaatcaaggccgtggccgcacaggacaccaagggtggcgtgcgcgaactgttccgtatcgctcgtccggcgctggtggccgccattggcatcatgctgttccagcagctcgtgggcatcaactcggtgatctacttcctgccgcaggtgttcatcaagggcttcggcttccctgaaggcgacgcaatctgggtgtcggtgggcatcggcgtggtgaacttcgtgagcaccatcgtggccacgcttatcatggatcgtttcccgcgcaagggcatgctgatcttcggttccatcgtgatgaccgtttcgctcgcagtgctcgccgtgatgaacttcgtgggcgacgtggccgtgctggccgtgccgacgatgattctcatcgctttctatatcctcggctttgcggtctcgtggggcccgatcgcctgggtgcttatcggcgagatcttcccgctgagcgtgcgcggcatcggctcctccttcggctcggcggcgaactggctgggcaacttcatcgtctcccagttcttcctcgtgctgctcgatgcgttcggcaacaatgtgggcggcccgttcgcgattttcggcgtgttctcggccctgtccatcccgttcgtgatgcgcttggtgcccgagaccaacggcaagtcgctggaggaaatcgaggaggaaatgaccaagcgctagacaaccggcacacgattcgcacaaaagttgacaactcttaacataatcgtacccaacgtggcgaaaaaacgtggcagaatagggagcatggtagcaaacaatgcgggtcagcccgccaccccagcagatctgatcaatgtcgatgaggttatcggcaaatactatgacctcgtccccgatcccgaagtccccgagcagcgtgtcatcttcggcacctccggccaccgcggatcgtccctgaagacctcgttcaacgaggcccacatcatcgccatctcccaggccatcgccgaataccgcaagaaggccggtgtcaccggcccgctgtacctcggctccgacacccacgcgctgtccggcccggccaagaagaccgccatcgaggtgctcgtcgccaacggcgtgcacgtgcgcgtcgactcccgtgacgacttcgtgcccaccccggtggtctcccaggccatcctgacccacaaccgtgcggccgacggcacccagcgcttcgagggcgagggcctcgccgacggcatcgtcgtcacgccgtcccacaacccgcccaccgacggtggcttcaagtacgaccccgtcaccggcggcccggctccggccgagaccaccaatgccatcgccgctcgcgccaacgagctgctcggcgacttcaagtccatcaagcgtgtgccctacgaggaggccatcaagtccgagtacgtcgagggcttcgacttccgcgagcactacgtggacgacctggagaacgtcatcgacttcgacgtgatccgcaactccggcgtgcgcctgggcatcgatccgctcggcggcgcttccgtgaactactggccgctcatcaacgagaagtacggcctgaacatcggcgtggtgcgtcctgaggtcgacccgacctggcgcttcatgaccatcgaccacgacggcaagatccgcatggacccgtcttccccgtacgccatgaagggcctggtcgacgagctcaacgccggcgcttgggacaagtacgatctggtcggcggcaccgacccggacgccgaccgtcacggcatcgtctgcccgaactggggcgtgatgaacccgaaccactacatcgccgtgtgcgtggagtacctgttcggcggcaaccgtccgggctggcctgagggcgcagccgtgggcaagacgctggtctcctcttccctgatcgaccgcgtggccgcatcgatcaacgcgaaggtcatcgaagtgccggtgggcttcaagtggttcgtggacccgctgttcagcggcgaagtcgccttcggcggcgaggagagctccggcatgagcttcctgcgcaaggacggccgcgtgtggaccaccgataaggatggtctgatccccgacctgctggccgccgagatcaccgccaagaccggcaagaacccggcccagcttcaccaggagcaggtcgagcgcttcggcgagtcttggtacaagcgcgtcgacaccccgaccacgctggagcagaaggccaagttcgccaagctgaccggtgatgatgtggccgccacgcagctggctggcgaagacatcaccgccaagctgaccgaggcaccgggcaaccacgccaagatcggcggtctgaaggtcaccaccaaggacaactggttcgccgcccgcccctccggcaccgagaacatctacaaggtgtacgccgagtctttcgtctcccccgaggctctggacaaggtgctcgacgaggccaccgtcgtggtagacaaggccctgagcgagtgaaatcgctgcgttagtcgcgttcaccgcaactaataaggctctgcattggattcatacaatccactgcagagcttttttagcgcatatgcagttcgcgaccactgaaacacgcaggtcaacggttctcctcatgcaccgtgactgcattttctcaacatcactgcagggcaggacggccagatgaccgcgaaacgttcgcctgcctacattatgaccgagtttcccatcatcattgtggggtcacagcggccagatgaccaccgaagcgttcggtcggcttgcatcatggtcgagttttaacatcgttgtgggacgccacgacgaatttgcccattccagagttgccatcccacaaaagcgtgggacaacagctaagtcaatcgttttacattttccccatcccacacactcaaactggaaaccccggaaagacgccattcctgccacacccgtcacagccattacccgaggggccgtgggacgccacgcaaaaatcggcaaaacacgcgtagcgtcccacacccattggcgcaaatccacgcccaatgcaccgcccccccccaatcgaccactatgacacatttccctccacaatcgaacactagtcattcacgaaatccatcactacgaggcatcgcaatcgaacggcatgcaatatcaagcacacaccacaacaacaggtcgtacaaatattgcctttacatcagtccgtttcgaacatcatggtcacagcaggctctgcgccaactcttcaagagacatggcaactacatgaaactcgaatacggcaccgcgcgaagcaagcgccctcgccacgttgaaagcgaattcagcacgagcgtcctcgttagcgatacttgccgccgtggcgacgaagaccagccatctccgcccgaccagcacaccccttttctcttggtcacggcgccattgagccttactcgtacgatgatgatcgccatcatattcaacagcgaccttgaactctggccacgctaagtccaacgttatgggagctccagatgcaaaagccgcgtccggcaccacatagttcgcaaccggccgtggaatcccatgcgctaccagagagagtcgttcttctgattctttgggcgaatcagcaccaggtgatatcagaggcaatgctcgaacgcaggacgggcgccctctgaatcgggtaaattgctccacgaacttcaccagatcctgatagattgcagcagcatcacgatccttggccaatactggctgtttgctcgtagcagcgatgacggcatccccgagcacaatcagggactcaaaagaaacatacggggcaagttgggcccatacgtgaaacaggtccagcgcaaacacgtgttggttcatttccacattggcggctttagccgcatgtttccaaatatgcgtttgcagtggtgcatggcgtgtacgaaaccgcttgctcttaacgctggatacagtgtgcagcttggccgagtcgaggtcgcaatcggcgggaatcggtacggattgcagagcgagggaagtggtcatgccgaaaagcagcttcttgcccgcccgtttcgcttcctcagtgcagcgtgcgaccatgtcgcgtctgcgctgggcgaggctttcgctcatggtcggtgtcgctgcagaatcatgtgcaccactgttcggcgatgacgagtcgcgagaagtcgggtatttcgagtcagtagaaaatgaccccgcaaattcgggcggaacaaaaactgcctccgattcttccggaggctgatcgtatatagagcctggcagagctccatagttggtgatgccgtcggtcatcctgttcatgacaccaccatatgggtagtgggtgcggaaacggaagccgatccgaggtatgtggtcctagcttcacttacgcacattcattgtggataaccatgtggacacctcacttatacacatagtcatccacctcttcaaccccgatttgacacactaactgtatctgatatgattacagcatcataactgtacacatcatagttacagtatcgactcggtaaggaggtcgtttcatgaacggcgaccattcactggcagtgcacgcattggtctaccttgactatcgcgccacacacctgcccagccagatcctggccgagaacatatgtaccaatgcggcgcgcgtgcgcaaagtaatgcgaccgctcgcctcagccggactcatcgccactaaagaaggtaccgaaggcgggtacgctctggcccggcccgccgccgaaatcactttgcgcgcggtagcggaagccaccggcaccacttttgtgaaagtgaactggacaccgggcgacgtacacgaggactgtctggtgtcatcttcaatgggcgcagtgatggatgacatctatgccgggctcaaccgcacttgcctcgaacaactcgaacacaccaccatccacgacatcaccgaacagatattcagcgagcgcaaaggctaataatcccgcgcgcttccctcagacagcatcagtcgataacgtttcggcagtcaaagaagaaaacagacgccgcacggcacacaacacatcagcacggcgcacgacgtatcagcacaacgcactcttatcactcgaatatgtaaggaaatgaccatgtccaccagcacacccaatgccatcagcacacccagcacctcccccactatcaccgccgacgccctgatcatcggattcggcaagggcggcaaaaccttggccgccaagctcagtgcagccggccgcaaggtcgtcgtcgccgaggcaagcgccaacatgtacggcggcacctgcatcaatatcggatgcttgccgtccaagtcactgattttgtccgccgaacaggcgcggcgggatggcgcgaacagtactcccgaaacccgcgaagcagcgttcgaggctgctatcaaggagaagcgccgcgtcacttcgatgctgcgcgacaagaactatcacaagctcgccgaccaagacaacatcaccgtaatcaccggccgcgctcacttcaccggccctcatagcgtggaaatcgccaccgctgagggcccggtcgccgtgaccgccagcaagatcttcatcaataccggtgccacgccgcgcattccggatattcccggtatccacactacgcccggcgtctacaccagcactggactgatggatctcgacgatatgccgcagcgactggtgattatcggttcaggattcattggacttgagtttgcctcgatgtttgccgatttcggcacggcggttaccgtgctgcagcacaatgccgagttcctgccgcgcgaggatgcggatgtggcggccgcgattcgcgcacagttggaagcgcagggcgtcaagttcctgttcaacgcggataccaaggccatcgcgcctgctgctgacggcggcgtcaggttgtccgttgcggtgaagggtatgactcgcggcgcatcgcaagcttgcgattccacccccgccggcaccgggaacgctcataccgatatcaccggtgccaccgacactacaacaaccaccagccccactagcaacccgaccgatcacgccacgatgtcacacgttcaaacgaaaccatcagacgatggcgagccgcggttcgccgagccggctgaagcccgattctgcctgaccaccgacgcggtactggtggccaccggacgtacgccgaacgtcgagggactgcatcttgaggcagctggcgtggagctcaccgaacgcggtgccgtgaaagtcgacgagcttctgcgcaccacagcagccgacatttgggctctgggcgatgtgaacggcggcccgcagcacacgtacatttcgctggatgactatcgcgtggtgtggtcgcagctcaatggttccgaccgtccgtacacggtgaaggaccgcaagcatgtgccgtcaagcacattcctcgccacgccttactcgcgcgtgggattgaatgagcgcgaggcgaaggcggctggattggattatgtggtcaagcgattgccggtggccgctgtgccgaaggcccaggtaatgcggcgaccggatggtctgatgaaggcgattgtggaacgcaatactggccgcattctgggtgcgatgctgctttccgtcgagtcgcacgaggtgatcaatatcgtcaagttggcgatggatcttgacgcgccggccagcacgttgcgcgatatggtgttcacgcatccgacgattgccgaggcactgaacgacttgttcgcgtagtttgttcgcatagcacgcccgcgcagcatgacccgcgtagcgcagcccgcaacagactcccctaatgcgcgcgaaggtcctcatcgacgtaaaccgatgaggaccttcgcgctgtcgtcatgatccggacgtgacagcaatcacgtccgaaccagccgttacttcaagccgagcttacggtccagaatgtcggaggcatccaatcctaagcggcgtcggatgaaccagccaagaccgagcggcaggccgggagccaaggccatgccgcctggaccgagtgccacggttttggagttgcctgcgataagcatggtgcccttggatgcggccgtggaggtcgaaccatcgctgtccgcctctggtttgaggatttcgatgttgccgtcactggttttgtacagtcccttattctcattccagataccggatgcgccattgttgccggcctcacccacagagaggaaatgtcttgtttttcttgtgagcgctcacctattcacgcgcgatggcatgtttttcaagcaaagtcaataggtgtgatgttattcacactcttcactacgttgttttgcctcgcactgggcaaccccacttcagcaagagattgcacagcttgcgttagggtggagaacatgactatcacagtatccacagatgggtccgcattagggaatccaaacgggccaatgggctgggcctgggccgatcatgagcagaacgccggcggcaagcccggccataagcacgacgaccatggttatgatgcgggcggcgcgaccaacggcaccaatcagattggtgagctgtgcgcagtgctggaagctttgcgagcgcacccgggccctgagccattgctcatcgaatcggattcgcagtacgccatcaattgctcgaccaagtgggtcaaaggctggaagaagaacggctggaaaaattcgcagaaaaagcctgtgaagaacaaagagcttattcaggcgatcgaccgtgagatctcacaacgccctggcccggtggatttccgatgggtcaaaggtcacgccggcaacgaaggcaatgagctggtcgatgaactggcacgcacctatgcgggcgattgccgttcgggtgcgcgcgacggctatctaccgattgaaggctggcagtcgctgctgggctccgaatacgcacatggcaccgatgtgcctccagacgtgcaattggtattggacggcaaagcggatgcggcaagtttgcgcaagccggctgcggcgacggatcagacggatgccgcaaggccggagaccaagtcttcgtcacccttagcggcacaatcaacgcaacctgtacaatcaacgcaacctgtaccccccgcaaagcccagcgggctgacggtatccggtacgctgaccttctcccccgcgccgaaaacgagcccgtatttcaacgggcagccgatgccgatcaaaggcagcatcgaaatcgaaggctatgtggacggcgacggcaacctgaccatcaccaacgcaccattcgtacgacactgacacccaaacacacgaatatgtaccgcaatcggacacgatgacacaaaatcgctcattcgcgttaggataggagataaggcttcacgccgttgatccgtgcggcggaggcaaggatggcaaaggagaaaccatggataaggcacagcaggatgcgctgaagaaggcggccggcatcgaagccgccaagctcgttgaaaacggcatgatcgcaggcctcggcactggttcgaccgtgaagttcctggtggacgagctcggccgccgtcatcaggaggaaggtcttgagttcactggcgtgaccacgtctcgccgcacgcaggcccaggccgagagctacggcatcaagatcgtggacatcgacgacgtggaccacatcgacgtgaccattgacggcgccgacgaagtcgacaagaacttcaacggcatcaagggcggcggcgctgctctgctgtgggagaagatcgtggccaccaactccaaccagatcgtgtggatcgtggacgagtccaaggttgtggacaccatcggcaagttcccgctgccggtcgaggtcattccgttcggtgccggccaagtcatcaagaagttcgaggcccgcggctacaagccggtgcttcgtcttgacgccgacggcaaggaagtgcgcaccgacgagaacaacttcgtggtggacctgcacctggagcgcatcgatcacccgcaggagctggccgaagacctcatcaacacggtcggcgtggtggagcacggcctgttcctcaacatggtcgacaaggtcatcgtcggcgacccgaacggcccgcgcgtgatgaccaacgccaacaagtgatcgtctcacatcactaagcttttccaagcccgcatctgcacatcgcaggtgcgggctttactgttgcccgaacaaggcaaagagccaagcaaaagagaaaccccgcgaccataacgatcacggggtttctaatgccttgattgcaggtaagactacttacgctggtggcgggtcttacgcagcagtttgcggtgcttcttcttgctcatccgcttgcggcgcttcttgatgacagaacccatctgaagcctccatttcgattaatcgtaaaagttgcaactcgcaccataatacacgtgttgccagacagagggaaccagtatgttgccgatagtccgcatatgccctgaacgcagttggggcatccacatcagcaatgtggatgccccaacgttcataagtttgcgcagcagctgacagccgatactagatgctacatcgggaacttctggtagaagcgatcgaccgcttccttggtgccggtagcttggaagaccacggtatcgttctgccagatggcaacggcgttcttgctgttggaggcatcggccttcaccacgtacgcgcccgtgacgttgccggaaaccttgacgttgccggatgccgactcatcgccggtctgcgcagcgaccaacgcatcgtactgggtcttggcattgtccgccgacgaccactgcgcggcgaccagcgtgacatccttggcggcatcaccagtggagtaggtcagagtgtactcctcgagcggcgacgcggaattccacgtcgtggaggcatccgccttggtacgcgcgtaattcagcacgctgcccggcatggccttcaacagctcactggcatcatccggcaaagctgtggcgtcgatggtcggcttggtcggctcggatgattcggttttctgctggctgttttgggtggtagtggaggtgccatcattcttctggatggcccaacccggccacacaaaggccgaaagcactgccaggataatcacaacagctgcggcaaccaccactgcaatcaacttgccatgggattgcgtggtcgaggagttctcactattagtcatgccccgattctctcacagccgcgtgacgctaggcggccgtaattttagtcgttgtgcgcaagccgcgtgaaactcttgtgaacggtaaaaatttaccgtccgctggtgtttgggttagggtgagaccatggcgaaatcaagtgtgcagtatgtatgttccgaatgcggttggaacgggccgaagtggtacggccgttgccccgagtgtggtcagtggggcacggtcgaggaatttcacgaggctcggccggcggcaggctctcgcacggccgctcccggccgaacatcacgcacgcagtcggttacggttgccaacaacgccagatctgcagcccgtccgattaccgaagtgggcacggaaagcgtcgagcggctcggtaccgggttttccgaattcgaccgtgtgctcggcggtggcgtggtgccgggttcagtaacgctgatagcgggcgaaccgggtatcggcaagtcgacattgctgttgcagacggccggcaatatcgcgcgcgttgtggcgggagacagtacgttccgaggggcaggtcagcggtctgcccaacagtcgggccgggcgcagggcaacgcatcgaacacggtgccgatgcggggcaacgcatcatcaacacacgccaacaccgtgctgtacatttccggcgaggaatcacaggcgcaggttcgtttgcgcgcttcccgcatcaatgcggtggagccgaacttgttactggcctccaccaccgacctgtccacagtattggggctgatcgaacagaacaagccggccttggccattgtggattcggcgcagaccatcgtctcgcaggaggtcgatggcatttccggcggttcgactcaggtgcgcgaagtggcaagcgcgctgatagataccgctaagacacttgacattccagtatttctggttggtcatgtgaccaaggatggttcgattgcaggcccgcgcacattggagcatctggtcgatgtggtctgccaattcgaaggcgacagcgagactgcgctgagaatgctgcgagcggtgaagaatcgttttggcccgaccgatgaagtcggctgtttcgacatgagcggtgaaggcatcgaagaggtcaccgatcccgccggattgttcctgtctggagacggccctgatgcggccaacgcggcacccgtggaaggcacctgcgtgacgttcacattggatgggcatcgcagtctgcctatcgaagtacaggctctggtcaccacgtcggtgctgcccacaccccgtcgtgcggtcaatggcgtggaccccagccgtatcgccatgctggtcgcggtgctctaccgtcacagcaagctcaacctgctgtccaacgacctgtatatctccactattgccgggggccaggccaaggagcccggttccgacttggcgatagtggcggcactggcgagcgccgccacgtcaaaacccattgcgcgagccacgtgcgccattggtgagatttccctgaccggtcaggtgcgcccggtaccgcgtatggaatatcgccttcgcgaggccgcacgcctcggcttcaccacggcggtcattccgccactgcgcaagccggtgcatgtcgagggacttcagctggtggagtccaacacattgtccgacgcattagacgccttgggagtgcgtaaatagccctgagatatgcctcaggcggtaagacgcttggtctcctcgacgttgcgcttgagttcgtcgacgagttggtcggggccatcaaacttgacctgcgggcgcaggaagccgacgaattcgacgcgaaccttgtggtcgtacaggtcgatccattcttcagtgatgcagtaggcctccaccacacgttcgttgagccctgttttctcgctgaaggtgggtttggtgccaatggagatggcggcgggccaacgattttcaccatctaccagccaaccggcatagacgccgtcgaccggaatgtagcctgcaatgtcggagccaagattggcggtggggaatccgatggtgcggccacgctcctcaccgtgcaccacttcgccctcgatggagtgcggagcacccagaatggcgttggcgtcctggattcggccatgagccagcaggtagcgcacattggtggagctccatgcgcgcattgccttggcctggttcttcttgctccatgcgcggcgctcggccttggtggcattggccagcgggtcgacgggctctccccattcgctcggggcttccggcttgaaatcgcgcggaatacgcacttcacccgggccacggtcatcgaccacgtcaagctcgaatacaccggtggcggcggcaagattagcgatatgcttaacgtcgccttctcgacccttgcccatggcggcatcctgcccaaggaccaacgtgcgcatacccagcttgccggtgagtcggccaaggaagaaaatgtatgacatagctgcgaaggccagcgtgtagtgcaccaccagcacatggtccacgccgaactgttccatgcggtgcagtcgatcatccacactggtcaaggcttcggcatccacgttctgcaccgcgggttcttcgccatggtgtgaggcggcccagccgtgtacgaatgcggggcgcgggtcaaacagaatcaccacggaaaaagcatcatgctggtgcgcgagttccaccacacgcttgatcaccgcctgatgacccaagtgcatgccatcaaatgcgcccaatgtcaccacggccttcttatcgttactgaacgagggccattcaatcgaaccttcggcgtcaggggtcaggtgcgtgatatccatcagtgtgctgttccttttatccgtgcgatgttattcatgcaatatagacgttgttgtgcgcggcctgtatcaagctgcacttttcaccgcgtctactttacgcgagggggaatacggtgaccggcttggcctgatgagcgtttgcacgctcgataatcgccgccacatcatgcgtttgcggcacaatggcggcagtgggctcgctgattgtacgctcaatacggcggccgaagcgtaattcgctggcctcctcaggagtgatgtcaagcgccggcatcgcacctcgagcggcctgttccatggtaagggcatggtcaagcagccagttgcggcgctcgtcaccggcaagaccttcaggagtgtccaatacgcacttgttgcgcgtgacggtttgcccttcccgattagtgaacgtcttctgatcggtatgtgcggtgacggtatgggttcgcgtgtcaagcatcgcctcagaggcgataagtccgctggcatcgtccggcaacgcgaatcggccgactcgcgtacgacgcaaacgggtcaggtatccgccgacgccaagttcgttgccgaggtcgcgggcgagcgcgcggatataggtgcccgatgaacagctgatccgcacgtcaacatcaagtgcgggaatcgctcccgtgttcgcgtcttcccgcaatggttcagcggcctgctcccctgctacgaatccgctgcggatatccagcacggtgaattcgctgatggtgaccgggcgaggtttgagttccacatccttgccttcgcgagccaagtcgtaggcacgctggccgttgattttgatggcggagaacgtattggggacttgttcgatatcgccggtgaaattggtggcgatggtgcgagtgagcaggttttgccatgaggcagttggtgacgccgttggttcgccgctctggccgccctcggtcagctgcgctgacagcgtttgccagcgggagcgggcttcatcatcgacaagcgcctcgccttcggcatcatcggtagtggtgcgcaggccgaggcgtatggtggcctcgtaggttttgtcatgcgccacgatggcgttgagcagtcgcgtggcgtggccgaaggcgatgaccagcgtgccagtggccatggggtcaagggtgccggcgtgaccgaccttcttgatgtgcaacgcgccgcgcacggcggcgacggcgtcgaaactggtcacgccttgcggcttgtcgatgatgagcagaccgctgggtgttgtatgaagcacactactcctcgtcagagtcgtcttcgaagtcgtcgctgggctcgtcgtcatgcttgtacggatcggcgtcgccggcgtactgggcggtggcgcgggcgcgggcgagttcttcgtcacgcttcttggccacggcgagaatgtcttcgatctcgtgagcctcgccgggcacttcatcgaacacgaattggagctgcggagtcaggcgcagtccagccttgtggcccaccagagaacgcaggtgacccttggcctgatcgagcgcctgctgggcgcgcttgcgttcgccttcctcgtggccttcgtggccgagctgggtccagtagaccttggcgatctgcagatcgttggtcacacgaacttcggtgacggtgatgctggcgagtcgcttgtcatgcagttcgcgctcaatggaggaggcgacgacacgctgaatcaaggccgcaatacgtgcggcgcgcgggttggttcctgccataggaatttccttttctagacttgagccccctctgacgaggggctgccgaacgcagtgaggctgggggagagaaaatcatggaactaccatgtctctcccccagtcagtctgcggctgacagccccctcgccagagggggcttaacaatgactacttgcgctcgacttcccgcatctcgaaggtctcgatgatgtcgccgagttcaatgtcgttgaaggtgccgaggttgataccagcctcgtagccttccttgacggactgaacgtcgtccttgaagcgacgcagcgaggagatctcgaggtcgttgaccgtggccacgccgttgcgcaggatacggcacttcgtaccacgcttgacctcgccgtcctgcaccataacgccggcgatgttgccgaacttggaggagcggaagatctcgcggatctcggagtgagaggtgacgacctcttcgtattccggcttgagcatgcccttgagggatgcctcgatgtcttcgatcgcacggtagatgaccgagtagtacttgatctccacgccctcgcgctcggcgaggtccgcgacctgacggttcggacgcacgttgaaaccgatgataacggccttgtcgaccgtggccaggttgacatcattctgggtgatcgcaccgacgccgcggtggatgacctggatgccgacctcgtcggatacctcgatcttcatcaaggaatcctcgagcgcctcgacagaaccggacgaatcgcccttgatgacaatattgagcatgtcgatctcggactcggcgaacttcttcttgaagtcctcgagggagacgaccttgcgacgcttggccagctgggcggcacgctcggtggcctgacgcttctcggcaatctggcgagcggcacgatcatcggaggcgaccaggaagaggtcaccggcggtgggcacggaggtcaagcccagcacctgaacaggtgtggacggaccggccgcttccatcggctgaccgttctcgtcgagcatggcacgcacgcggccgtacgaagtgccggccacgatggcatcgcccacgtggagcgtaccctgctgaaccagcacagtggccacggcaccacgacccttgtcgagtcgggcttcgacggtggcaccacgggcgtccatgtcggggttggcgcggaggtccagctcagcgtcagccgtgagcagcacggcttcgagcagcttgtcgacgtgcaggttctgcttggcggagatgtcgacgaacatggtgtcgccaccatactcttcagggaccaagccgaactcggtgagctggccgcggaccttctccgggttggcaccgggcacatcgatcttgttgacggccacgacgatcggcaccttggcggcctgagcgtggttgatggcctcaacggtctggggcatcacaccatcgtcggcggcgaccacgaggatcgcgacgtcagtgagctcggcaccacgggcacgcatggcggtgaacgcctcgtggccaggggtatcgaggaaggtgatcttgcgcggttcgccttcaaggttcacggtgacctggtaggcaccgatgcgctgggtaatgccgccggcctcacgtgcgatgacgttggtcttgcggatggtatccagcagtcgtgtcttaccgtggtcgacgtggcccatgacggtaacgaccggcgggcgaggcttgagatcctcgtcatcctgcagttcttcctcgtcaaggttgatgtcgaactgctggagcagttccttgtcttcctcttctgcggagacgagctggatgttccagccgatctcttcgcccagaatctggaaggtctcctcatccaaggactgggtggcggtagccatctgacccaggtggaagagcacggtgaccagcgcggcctggttgacgttgatcttctccgcaagatcggccagggacgcgccctgacgcagacggatggtctggccgttgccgttggggatgcgaacgccgccgatggtcggtgctttcagctcctcatactcatggcgctttgccagacggttcttacgggcctttgaagacttgccgccctgacgtccgaatgcgcctgcggcaccgccgcgaccgccgcgaccgccgccacgtgcgggaccgttgctcggtgcaccgccgccctggaagttattgccgccgccttggcccccacggaagccgccgcgtgcgccgccctgaccggcaccctgggagccgccgccctgacccggacggttgtggccccactggccgggacgaggaccgccctgaccaccttggcccggacgaccgccacggaagccgcggccctgcccctggccttggccgggacggcccggacgaccgccacgaccgttatcagcagtcggacgagccatcggatgcggacgcggaatatcacccggcgtcggggtgtgcataccctgcttgcgggagaacgggttgttgcccgggcgcgggccctgagcgtgcgggcgcggaatcgcatttgaagcggcattgccgccattggcaccggcgccgccctgagcgtgcgggcgcggagccgaagcattgccgcggttgttctggtgctgaaccggctggctattgttcgtacggccctggttgttacgacgatcgttgttacggcgatcgttcgggcgactctgacgaccgttctcacggccttcgcgattatcgcgaccattctcacggttgtcgttctgaccgtggcgaccgggggtcggcatgccggggcgtgcaccgccctgcggacgcggtgtcggtgcacccggagtcggagcctgctgatgtgccgaggcaggcgatgcctgacgtgcgggagcggccggagtcggtgcggaagatgaagtggaagccggggccgaaggtgcggccgggcggcgctgctgcacgggcttggaatcgcccttggcgttgtccttggcgaactctgccttcagacgccgggctaccggcggttcaatcgtagaagaagcggacttgacgaattctcccatgtccttaagcttctcaagcacggttttgctatcgacattcaaaaccttagccagttcgtatacgcgtggtttcgccactaattactcctattctgtgaccacgcgcgtgcatgggcgtggtcagttggtgatgacggcaagcctaccctgtctcatcgtgcgaccatgatcgtgttacctcgtctctggtgtgggcgatttcgcgcacactgcgccagcccacatacgccaatcaagcatactcatagcgctggatagcgtagacgcagcgagccgcgccattgctgacgcggctcgtatcaggaaataatgcgccctgaagatcattcgtcttcgagcccggcggcctattcggcttccggagcagcagcctcggccgcagcctgggcggccttttcggcggcgaccttcttggcatgggcctcggcggattcgatgccgatcttccagccggtcagcttggctgccagtcgtgcgttctggccttccttgccgatggccagggacagctggtcgtcgtggatgaaggcgatggcggtcttgttcttctcgctgatcacctgcacgccggtggccacagccggggacagcgcggctgccacgaacttggccggatcgtcggagtagtcgacgatgtcgatcttctccgggccaaggttctccataacggcacgcacgcgagcgccgccggggccgatcagcgcgcccttcgggttcacgccatcggtgttggccttgaccgcgatcttggtgcgggcgccggcctcacgagcgatggccatgatggacacggcaccggagaccagttccggcacttcgcgctcgaacagcttgcggaccagctccgggtgggagcgggacaccacgatttccgggcccttgatgccacgggccacgttcaccacgtacacgcggatgcgttcgccgtggcggtaacgttcgccgggcacctgctcacggcgaggcagaatggcttcgacatcgcccatcgcgacatgcacgttggaggggtcggaagcatcctgctggatgatgccggtgatgagcttgcccttttggccggagaacgcaccgaataccttctcatcttcggcgcggcggaacagctgggtgatgacctggcgtgcggtggctgcggcgagacggccgaagtcacgcggggtgtcatcgtattcctcgcccagcttgggagcggggtaagggttgtcttcggtgggttcgaccggaatttcgtcggcggcccacacggtgaagttgccggaacgttcgtcaagctccacgcgcgcgtgcttggcggcgtgcggggtcttgaggtaggcgaggcgcagggcctctgccagcgcatcatccagggtttcggggtcgattccttgctcggcggcgagcttgtgtattcctgtcaggtccagttccatcgatccgtacctcctatgaagttatgtggcgcatggcctatgagtagtcacagttagctattagtgtatgtttccatgcagacacgcttctcttcaggacggtttacccggcgcttggcatccgtactatgcgcgagcgcgatgctgtgttcgctttcggcgtgttcgatgccgcgattggccggacgggccgaggcggaagctcaaatgaccccttgcgagaaagcgatgacgttggcgaactacgccacccatccggctgaaggcacaccgttattagagcagtatgccaccggtctggccgcccccctggcttggattgacgttgccgggtattgttcgggtcgttttgccgagggaacgttacgtgacgcgcagaccaagcaatggatggcttttctggccgataaattcgggcagtccgcgcctgaggtgacgccggcgcgtcttgatggcgtcacgtccgccaacgttgaccgatcggtattggatgcgatggccgtggccgaggatcgcgccggattcgctatcgaggtcttggccgcacgaggacagaccgctggggctacgttggcgttgagtgatatgcataagaccgccgggcagcagttggttgcgctggcgaacggcaattttgatgattccggcgcacaatccagttcttccggccaaagcgacccccgccaaaaggtctatgccatcgaccaactactggccaaccccaccaccatcgccgacaaggcaagtggccaaaccgtaccgaccgccgccgccatcgaaatggactgcgcccgcgcgcagatcaaggccgtgaccgaatcgaaatcttccaccgagagcgatatgctgctcatcctcgccgcactggccgccaagcacgcctacaccgcgttccaacttggctacccagcgactgacgccgaattgttcgagtagacacacactcctcacgaagccgatgcgaacttgttggatgctagtgggcaagtcgagttgaggcacgttccaccaatgtgaaatcggtggtgtacgtacgggccgggcctgagtatccttcgatgcggtcgataagcatgtcaacggcatgcttggcataatcatcgatatgaggatcgatggtggtcagcgccggcaccgagtactcggcttccggcacgttatcgaagccgaccacttgtacatcgtcaggtacatgcaaaccacgtcgttgcaattcatgaattgcgcctaaagcaatggcatcattgagacacactacaacatccgggcatgggagcttgtctagcatagcttttgtcacgcgcataccttcacgctgattcatgctttctgccggaatcacataccgccaattcaccgataatccgcgctcttcaaatgccttcacatatccttgggcgcgtaacgcctgggtcccttccgtctgacgacgcagcactgcctcatccaccagttcaggaagaacacccatcagagcaaccgtttgggcaccttcatccaaaaatcttcctacaaccgtggagatggattcaatgttgggcatggtgatccaatcgcttttcccgtaggccagatggtctccggtcgttacaatcggatatggctgctccagaacggccccttcatccgcgagcggcgacattacgaacagaatccatccttccgcccctaaacgataggactcgtcaacgctggcaaccaacccttcaccgtcggaaccatatgtgttgatgactacaccgtaatggcgttcttttgcgtattcaatgaccttgtcagtgaaaaaaggaacgaacggctgcgagaaatcgaagatgttgagtccaataagctttgtgccgccagatcgcattgcacgcgccgaaatattgacggtatatccaagcttacgcatcacctcttccacacggcgacgtgtatccggtctcatactgccagtgtcattcagcacattggaaaccgtcttgatggagacgttcgcctcacgcgccacgtccttgatagttacgcggtttcccattgttcgaatccatttctgcttattacatgacacaccttcaacagcgtcattatgttcttattatggtaagtcacagtcgggtcgagcatctcctcctcatatcggaatcatctacccctcaacctcagaattcagccaaggagctttcctccgttggaccccatgcaccattaggcaaatatccttctgacaatactgcaggacgatcgaacgtagaggttaaactttctggttgaagaaacgcacgcacgccatccgaacaagggactttctgaccgccggctttcaacctagctttttacatacccgtcttttctccttattcctttgttgggtatcgaattgttccagtcgatgtgaatgacggcattgtcttcctttgactggtatgccacattacattagtggcgaatccgaacctctctttctgcaatccgggcatgttgatgattgtttgggtattgcttggtggttgtacagggcacagcagccataagagactgcgccctgtcatgcgccaccgtcactcgaatcacttcacgtgcacggcggtccaggagaccggcggcaaggtcacacgcacagtgccggtatcggcgtcggacgtgatggtggtgttggggtgcagaacgactcggttctggtcttccagcgtgttttttgccagcagatcatcctcgtgcagggtttgcgcctcgaccgcggaaagtgcgaatccttccggcagcttgatggcaaagtcattggccgcttccatggagcgattgaccacaaacacgctgatcgtaccgtcctcaccacgcacggctacggaattgatcgtcggcacttcaccgtatttgtcggtttcatacgttccggaagccagtttcggttcaagcaccgtgccgcccttggcgagctttgcggtcagcgagaacggatagaacgtggtctgacgccacgccgggccgcccggttcggtcataatcggcgcaattacgttgaccaactgggccaggctggcggcgtgcacgcggtcggcgttcttgagcagggtaatcatcagatcaccgaacaccacggcgtcggcggcgctgtacacatcctcgagcaggcgcggggcaaccggccaattgccgatgccttccggattcttgctcggctcttcgttgagataccagacattccattcatcgaacgagatgaacacgtcgtgcttgctcttcagccgggccttggttgcatcgatggcggcggcgacatcgttgatgaaaccgtccatatcgacgcccgaggcaaggaagctcttcatgtcacgggtgccatcaggctgaagttccggatggtagtacgcatggcaggagacgaagttgacgttgtcaaacgtcttctcaagtacggtttcttcccacttgccgaaggtgtccatcacgtggctggatgaaccacagaccaccagttcaacgttcggatcgatggcgcgcatacctgccgccaccgaggccgccaaggtgccgtaatcctcggcggacttgtgaccggtctgccacgggccatccatctcattgcccaagcaccacatcttgatgccgaacggctgatcggcaccattggcgcgacgctcctcggagagcttggtgccgccgggaatattcgcgtattccaacaggtcgagggcctcttcaagaccacgggtacccagatttacggcttccatcagctcgttgccgccggttttttccagccatttcgccatttcgtgcagaccaaactgattggtctcggtggaatgccatgccaagtccaggcgacgcggccgctcatcacgaggaccaacgccatcctcccagcgatagccggaaacgaaattgccgccaggatagcgaatcgtggtagcgccgagttccttgaccagttcgatgacgtccttgcggaaaccgtcttcatcggcttcggggtggcccggctcatagatgccgtcgtatacgcagcgacccagatgctccacgaacgacccgaacagtctgtcgttgaccggagctacttcaaagtcattatcgacgacgagtcgagattcctccagctcccccggtttattgtcgtgcgaatgctcggacatgtgctctcctttaatcgttgtcttcaataccgcaagacaacgttgtgctaaataccaaaagcaatcggcccatcttcttggttcacctgttttgcggcatcgccaatcagcggtgaatgtgcgttctggatatttaatacaaccttgtacttctgttgatatcgataatacgatggttgtacttagtacgcaagccccgctgagtacaacgttatccttttcgctattttccacccgacacgccgtatacgatacagcacaggagcgaatacggacgttcgtatcaaaaacaaaaagggttccgggacaaacccggaaccctaaaggcggataaggcgagattcgaactcgcggaggctttcacctcacacgctttcgaggcgtgctccttagaccgctcggacacttatccatgctgccaaaatggcaacttgttcattatgccacattctgccgacctggcaaatcggagtttcgctgagctcgattcggcgtgggataatgcgattttgtgtgagattgcgatgggtcagacgatgagccgattaacagtccgaattggtcaactgcgaaaatccgaattcttcaactaccaaaatccgaatgtcgcaacgacgaaaatccgaatattggcggtggtagaagcggcgacggggccactctgcattgagtggtctctccctcggtcagccttacggctgacagctcgaacgcaattaaggacagctttccagctgccattttatttgctcactgtcgttcgtcttcgcctaaaaacgcctccggcgttttcttcacggctcagctcatcagagggggcttggaattttgtttatgccacctgttcgtggacggaggcgttgacccattgggactgctggacgttgtagccggagaagatgccgatgtcgagcatgcagtcgcggtaatcgcggccgtgggcgatggtgatgtagctgtcgtccaccaatcggttatgcgtgggatccagtccgacccatcggccatcctgatacacctcgacccaggcgtgggtcgcgccctctcccccaagcaaaccggcaatgtagcgcgcggtcaatcccacatgccggcacacggacagcatcacgtgcgcataatcctggcatacgcccttgcgctgggccaaggcctgttcggcggtggtgcgaatcgtggtggaaccgggcgtgtacacaaacgccttgtagacctcatccatcacttcggcggcctgctgcaccggagtggcgtcggaaggcagcgccgccaagcgttcgcggcatacggcaatcatcgcctccacgttcgggccgggaatggtgagcgctgaattgaatcggtacagcggtttataggcttccttatggatatgcgcattgtccacgaaggcgatgccggtcaccgagtagctgaatatgtcgtgcggctcagggatgaatccggtcatcaccacggagtcaaaggagtcgatggtggtttcgagttcggtttcgggctgaatcttcacttccacgtcaatcacctgttggcgagggccagtggagggaatacagcgaagctggaacctgtgatcggtgaccggtgcgctgaaggacagtctcatctcatagtcgaacacgagttttttcacaacgtctcctgcacttgcacacgagccggcaaccggcatattctcgggataacaacactacagccatggctgaggtatggtccgtgcgctcacagcccacgcatatattccggcaatctgctgatatgcacaggccggcactcgggcgcacggttttttcgccataccaccatagcatttgaacccgtcagggtgtcaggtcgggatcagggacgcttggcgtccatgttcatggagctcagtgagcccatgtctttgatggccagcgcgctgacacggccggagtagtcgtcaaggtacttcttcagcaggtcggcgacttcctgatatccgcgagacggcagctgaccgaccagccagctcagtccgtcggcgaagcagctgggcagcggcatgccgtccaaggtcatcgaataggcggcgagcttcttgagcggcgcttccagctcctccatcgtcaggccgaagcgcgtgtacaggtcgatgcgttccagatatttgccgatgaagatgaacgccttcagtgtggggtcgaccggcgaattctcgatgccgccccagaaggcgagcatgtcatcggtaatatcgcgctgcttgtagatgtcctcggcatcggccgcgtatttggcggcatcggtgatattggtcatcgccaactccacgtactgcagcagacgcgagctcaattccgggcgcagaatcacggcgttgttgaatgcggaggttacggccgaccgcaccgaatcaggattggacccgtcatacaggaagctgttcacgaacccgtcgaagtcctcgaaatcttcgggcaggtcgagtgcgtgagcgaacggacggaaggcgtccacatcggtgtccatcacacgatcgtagaacgggaagaactggttcagcgtggtgaaggcgcgctcggtgtaccgacccagccaatacaggttgtctgccttggaagcggtgaccagagacaacgagtggcggcgggactggttcagcaggttcaccacctgcacttcagcaccgtattcatgctccacgccggattcgggtgccaacacccacgtatccttgaatccgccaccctgcgacgagttgacaatcatctggccgggcaccgacgagtatcgagtcaagcccgaataccacacgtgcgtattcttgccggtgaccacgaaggcacgcaaatcgcacttgcgcggcgacatctcgccggtcttcgggtccaccacatcgatatcacggaactgaatcacctcttgggcaatgaatcgacgcggctcctccttgatccggttggcgagctcctcacgtgcggcggcatccagcgacgaaccaaacaccacgccgtaaccgccggcttcggccacatccttgatgaccagctcgcccatacgattcaggacttccttacggtcggcctcgaacagcggcatatacgtgggcgcgttgttgagaatcggttcctcgccgagatagtacttgatcatctgcggcacgaagtagtagatggccttgtcatcggccgcgccgttgcccggcgcgttgacgatggccacgttgcccgcgcggtaggcggacaggataccgggcacaccgatcaccgaatcaggattgaaggcgaacgggtcgaggaattcgtcggacaggcggcggtagaccacgcccacacggtggcgtttgccggcgtagtcgaggaagtagaccttgttgtccaccacttcgaggtcttcggggaaggccaacgccgcaccggttttctccgccagataggcgtgctcgaagaacgcggaattgtagcggccgggagtcagtaccacggcgatgccctcggtggagacaaagtccatggctttgcgcaacaggcgcgggtattcgcgattatcgcgaatacgaacgtcgcggaacaggcgcggggagatgcggcgctcgatgtcgcgcacgaacagcgggtagctggcacccgagggaatacgcaggttgtcttccagcacccaccatcgtccgtcctcgccttggaccaggtcctcgccggcgatgtgcgcaaaaatgccgccgggaggggtcacgccgttgacctgcgggaagtagccggccgaggtgtatacgtattcttccggcacgacgccatcatgaataatgcgcttatcggaataaatgtccttcagataggcgttcagggcgttgacgcgctgcttcaggcccttctccaattcgtcgtattcgtcggattcgataatgcgcggcacagggtcgtacgggaacagccggtcatggtattcgccgttcttgtagatgccgaaacgcacaccgttgcgggacagctctcgattgatcgcttcgcggcggtttaccagttcatgggccagtctgcgtgctgcggattcgatcatcgtgcctgctccttgctgtggcggcttctgtggcttcaagcggttaggcgtgttgagcgcacgctgacgccgcaagccgtaaccgggtttgatggtttcaacctaggcggggctcatttcagcaaatgcgcgagaatgttacaggcaggtcacttcgccggccgcgcgcatcttgacgaccgcgctcgtctcgccgaccgcactcgttacaatgaatggctatgacacgactgcgcattgacttggcctacgacggcggcggattctatggctgggccaaacagcccaatcttcgtacggtgcaaggcaccattgaagatgcgctgcacaaggtgctgcgggtgccggccgatgacgcggccgaaccgttacgcttgacggtggctggacgcaccgacaccggtgtgcacgcctcccaccaagtggcgcatctggatgtatccgatgaggtactgaatcgctgcgtaggtcacatgaccattccggtcaccgaggcgctgactcgcagactcaaggctgtgctgcctccggacatcgtcattcatggcattgccgtagctccggtcggattcgatgccaggttctccgcattggagcgcacttatgtgtatcgggtcgccgatcgttcgtctgaggtcgacccgcgcctgcgtggatgcgtgcttaccgtggatgaagcgctggatctggagcttatgaaccgcgcagcctcattgaccatcggcctgcacgattttggttccttcgccactccgaatccgggaggcactacgatccgtgaagtcaagaccgcctattggcggcgggtgccaatcactcctctggtgccggatgcgatggcatcgcatgaagcatatcggactccgtcgctggagtccggcctggtagtgttcacgattgtggcggacgcctttgcccgcaatatggtgcgctccctggtcggctcatgcatcaaagttggttcgggacgcaaatcactggagtggtttgccggcaaaatggccgagccagtacgtgaaggctcaagcgggccgattgcgccgcagggcctgactttggagcatatcgcatatcccgccgatgatcagctggccgcaagagccgaggccattcgggccgtacgtacgttgtagattctatgaaaacaacgcaaaagggctggaacccaaacggattccagccctttcagttagcttagcgaaacgctattcagctcactcggccttctcggcgtcagcggcttcctcagcgggagcctcagcctcagcggcggcggtctcctcgaccggagcctcaacagcctcagtggcctcagcctcaacggccggagcttcttcttcggcaaccttggcggcggcttcagcttccttcacaacagccttcttggcaaccggctcggtgacgagctcgatcacagcggccggagcggcatcgccaacgcgcggagcgatcttgacgatacgggtgtagccaccttcacgctgctccatctgctcggcaatctgggtgaacaggatgtgcaccacggacttgttgcggatgacgcgcatcacgcgacggcgggagtgcagatcaccgcgcttggcgaaggtgatcaggcgctctgccagcggacgaaggcgcttggccttcggcagcgtggtggtgatgcggccgttctggaacaggctggtcgccatgtttgccagcatgaggcgctcgtgtgcggggctggaagccagacgcgggcccttcttaggtgtaggcattgggtttactccttatatgtccgttcttcaggcaagcaggtgggcatatgcccgaacatctgcttgcctagtgaacgaacgattggtcaaagaggcagatcactcgtcttccggcgagaagaacgtgccaccttcgagattattggtatcgaaggccatcggcgaggacttgaggctcaggcccaaggtctgcagcttctccttgacctcatcgattgacttcataccgaaattgcggatgtcgagcaggtcctgctcggtgtgggagacaagctcaccgatggtgtggatgccctcgcgcttgaggcagttgtaagaacgctgcgtcaggttgaggtcctcaatcggaacggccatctcggggttggtctcctcggccaccggggccggaccgacctcgacgccttcagcctgggcattgagctcacggcacaggccgaagagctccaccaaggtggaaccggcggaagccaccgcgtcacgcggggagatggcgggcttggtctccacgtccaggatgagcttgtcgaagtccgtgcgctgttccacacgggtggcctcgaccttgtagctcaccttgagtaccggggagtagatggaatcaaccggaatacggccgatctcatcgttgtcctgcttgttcatctgggcaggaacatagccacggccacgctcgacagtgaactcgatctcgagttcgccatcgtcggcgagggtagcgatgtgctgctccgggttggcaatggtgacgccggccggcggggtgatgtccccagccacggcttcgcccttgccgctcttgcgcagatacatgaccacaggctcgtcgtattcgctggtgagcacgatgcccttgatgttcagcaggatctcggtgacgtcttcctggacacccggcagagtggtgaactcatgcagggcaccggaaatacgcacggaggtcacggcagcacccgggatggagctcagcagcgtgcgacgcagcgagttgccgagcgtgtagccgaagccaggctcgagcggctcgatggtgaagcgggagcgctgcggattcagagattcctcggtaagagtcggacgctgtgcaataagcactgtggttatcctttcagcttgaactcggtggtgcactcaccggtcaggcggttttggatggatttggtattgctgagtgctcagacgcgacgacgcttcggaggacgaacgccgttgtgggcttgcggggtgacgtcggtaatggaaccaacctcgaggcccgcagactgcagggaacggatggcggtttcacgaccggaacccggaccctttacgaacacgtcgaccttcttgacgccgtgttccatcgccttgcgggcggcggactcggcagccatgccagcggcgtacggcgtggacttacgggagcccttgaagccgacatcgccaccggacgcccaggacaccacggcgccggacggatcggtgatcgaaatgatcgtgttgttgaaagtggacttgatgtgagcctggccgaccgggaccgacttgcggtcgcgacgacggggcttacgagcggcttgcttaggcgctgccattgaccctcgtttcctagtaacgaactttgttgttgacgttcgggcgatgggatgaaaatcatcccgtggcccgaatcatgccaccgactacttggtggccttcttctttccggcgaccgtgcgcttcgggcccttgcgggtacgagcattggtcttggtgcgctggccgcgcacaggaagtcccttacggtgacgctggccttggtagcagttgatctgaatcttgcgacgaatatctgcatcgacttcacgacgcaggtcaccctcgatcttgtagttggcttcgaggtagtcacgcagcgtaatcagctgctcgtcggtgagatccttgacgcggatgtccgggctaataccggtcgcggcaagcgtttccttggcacgagtgcgacccacaccgaaaatgtaggtgagggcgatctcgatgcgcttctcattggggatgtcgactccggcaagacgtgccattgcgattccttcttgttgccgtaggtcttgcacccgctcgcccggttacccggcacgggcctacgtacccgtggttcagtgtcgttcccttgcgggaagcactgtgagagagtgccttatttacttagtgccgctggagaatctgctctcagccctgacgctgcttgtggcgcgggttgacgcagatcaccatgacgcggccgtgacggcggatcacgcggcagttttcgcagatcctcttcacgctagggctgaccttcatggttatccttttcttgtgtacctttacttgtaacggtacgtaatgcgtccgcggtccaggtcgtaagggctcatttcgagcacgacacgatcctgcggcagaatacgaatgtagttcttacgcattttgccggaaatcgtggcgagcacgatgtgcttgttttcgagttcaacgcggaacatcgcgttaggcagtgcttccacgacctgtccttcgacttcaatcacaccgtcttttgccatgtgcctctagtcctattccgttggatgattactatggcatatccgaagacacaccaactgtcaactatatacgcacatacccctgtacgaacactcggcgtgtcgcacaggggtatggaaacgttgatgtggtatttcggcatcactccggcttgttgcccgggttgccgaacctactactcgaggtggctgatgatacggccgctgatctcgtcgatgtcgccgacgccgttgaccacgacgagcaggccacgggcctcgtagatgtcgagcagcggagcggtttccttctcataggtctccaggcgcttggcgatggcctccggagtgtcgtcagcgcggccctgctcggcggcgcgcttcttcatacgctccagcagcacgtcgcgggcggcttcgagggccaccacgtggtcgagcggagtgtcgaggtcggcgagcatctcgtcgagagcggtgacctgggcggcgttacgcgggtagccgtcgaggatccagccgttcttgcagtcttccttggccagacgatccttgacgatcttgttggtcagggagtccggaaccagctcgcccttgtcggtgtagctcatcgcctcaaggccgagttcggtcttgttcttgatgttgtagcggaagatgtcgccggtggagatggtggggatgttgaagtgttcggcgagcagagcagcctgggtgcccttgcccacgccctgagggcccatgatgagcagacgcatggtggtctccttttatgtcggttattaatacggttttggctcccttggttaagggagccattgagttatatgcggaagaaagattgctccatcgtggaacagtccactggactgttccactcctcgcgcggccgcctgcccattgcggacggccgctgccaagcgggcgtcagccctctttgtggtccacgttttcgaacaggaagccggtgtactggaactgttcggtctgggccttggcctggcgcagggtgtcgaggcccacgcccgcgataatcaggatcgtggtgccaccgaacggcagcttggcgttgaggccgagggccatgatcagcacggtcgggatcagggccacgaacagcaggtagacggcgccgacggtgttgagtcggttcatcacgtaggtcaggtagcggctggtggcgttgccggcgcggatgccggggatgaagccgccgtactgcttcatgttgtccgcggtctcgtccgggttgaacgtgatcgaggtgtagaagaagcagaagaacacgatcatcagcgcgtacagcgcgatgtaccacacggaggtggtgttcgccaggttggcgttgatccacttgacccacgactggtcggacttgccgaactgggcgatcagggtcgggatggcgaggatcgaggaggcgaagatcggcgggatgacgccggacatgttgatcttcagcggcaggtaggtggaggagccgccgtacatcttacggccgatcatgcggcgcgtgtactggaccgggacgcggcgctggcacagttcgacgaagtcgacgaagatgaggatgaccacgagcacgcccacgacgatgccgaacttgagccagtcgccgtcggtgccgttggtgccgtagccgatctcccacagctgcggcaggaagccggagcagatggacatgaagatcaagatggacatgccctggccgatgcccttgtcggtcacgagctcggccatccacatgatcaggccggtgccgccggtcatgatgaggaccatgaccacgaggttgaacacggagccgtccgggatgacctggtcgcactggtagttgaacagggcgccggagcgggcggtgaccaggatggtggtggactggagcacggccaggccgatggtcaggtaacgggtgtactgggtgagcttggcctcgccggactggccctccttgtgcagggcctcgaagcgggggatgaccacgcgcagcagctgcaccacgatggacgcggtgatgtacggcatgacgcccagcgcgaagatagacagctggagcatggcgccacccgagaagaggttcaccagtccgatgaagttctcctgggaggcgctgccgatggtggccatgcacttgttcaccacgttgtagtccacgccaggggtcggaatgaacgaaccgatgcggtagacgatgatgatgaacaggacgaagagaatcttcttcctcaactctttggttttcagggcctggattagtgtcctcacctagatttcctcccaatagcgcgccaatcgcgcgaaatacacaaactaacgaacgagcatagtctaaagtgcctacttcggccacttcatgtctcgcgaatgttacctgaattatgctccgtcgtactgaacggggggaagcatactcaaaacgatcattgtgttgagactgcttctctgcactcagaacaacaattttttagaaaagggaacccccgtccacctattggcgggcgggggttgtacagcctattgcgctccccgtaggactaatcagtcctcggaaacggaaccgccggcggcctcgatcttggacttggcggaagccgaagccttaacacccttgagggtgaaagccacggtggtctcgccgtcgcccagaaccttcaccggagcgttgtcacgaacagcgcccttggcgatcaggtcggccacagcaacctcgccgccctcggggaagagctccacgagacgagcgatgttgatgacctggaactcgaccttgaacgggttcttgaagccacggagcttcggcaggcgcatgtacagcggcagctggccgccttcaaagcccggacgcacgtggttgcgcttcgtctggcccttggcgccacgaccggcggtcttacccttggagccttcaccgcggcccacacgggtgcggtccttcttggcacccggggcgggcttcaggtcgtgcatctgcaggatttcgttatctgccataatcagtcaacctcctcaacggtgaccaggtgacgcacggcgttcaccagaccacggttggccggggtgtcctcgcggacaacggtcttaccgatcttgttgaggccgagggtcttgacggtggcgcgctgagccggggtacggttcacgatgccgtggtgcagggtaatcttcaggttcttagccatgagtatcactcaccatccttctcttcggcggccttagcggcagcagcctcttcgcgagccttgcgagcctcggcaatgccggcggcgcgggcgcgcagcagagcatcgggagcgacctcgtcgagcgccaggccacgacgggcggcgatctcctcgggctcttcgagctgcttgagggcgtcaacggtagcgcgcaccacgttaacggcggtggcggagcccatcgacttggtcaggacgtcggtgatgcctgcgcattccatgacggcgcgcacggagccaccggcgattacaccggtacccggggcggccggacgcagcaggacggtgccagcagcgtcgtgaccctgaaccgggtgggtgatggtgccgcggacgcgaggcacagagaacatgtgcttcttggcgtccagctggcccttggcgatggcggccgggacttcacgggacttgccgtagccgacacccacggtgccgttgccgtcgccgaccacaaccagtgcggcgaagctgaaggtacggccacccttgtgggtcttggacacacggttgatggtcaccacgcgatcgagcagctcgtcgccatggttttcttcacgacggttacgacgctcgccacgacggccttcaccgcgctggccacgacgacccttgcggtcctcgttgttggattcggtcgccacagtgttctgagtttcttcagccacttgggtttccttcgtttcgttgtcgctcacagtgcaagacctccctcgcgggcgccatcagcaacggctgcgacgcgaccggtgtacttgttgccaccgcggtcgaacacgactgcggtgatgccggcagccttggccttctcggcgatcagctcgccgaccttcttggcggcctcagtcttggtgccttcgaagccggcgaagtcggcctgaagagtggaggcggacaccagggtaatgcccttggtatcgtcgaccacctgagcaaccatgtgacggttggagcgggtgaccaccaggcgcggacgctcgggggtaccggagatgcgcttgcggatacgcgcgtgacggcgcttgagagctaccttcttgccttttccgagaatagcaacgctcatatcacttaccagcctttccagccttgcgcaggatgcgttcatcggagtacttgatgcccttgcccttgtagggttccggagcgcgcagcttgcggatgttggcggcaacctggcccacgacctgcttgtcggtgccttcgacaaccacgtggttggcgtcggtcaccttcagggtgatgccttcgggcgggttgacggtgatggtgtgggagtagccgaggaagaactcgatgccctggcccttggcgacggcgcggtaaccggtgccgacgatctcaagagtcttggagtagccatcgtgaacacccttgaccatgccggccatgatggaacgagccagaccgtgcttggcacgggtcggacgcaggtcatcagcggcggtcaggacaatctcgttgccttcaacggcagcggtgatgccttccggaaccacgtaggagtcagaacccttagcgcccttggcggagaagttctggccttcaatcttgacttcaacgccagcagggatggcgatggggagcttaccaatatgcgatgccatgtttcagctctcctttctcaccacacgaaggcgacaatttcgccgccaatgcctcggtcgaggcattccttctgagtcagcagtcccgaagaagtcgagatgatggcgatacccaggccaccgagcggcatcggcagggagtcggacttcgcgtaacgacgaaggcccggcttggagatgcgcttgataccctgaatggaacgctcaccgttcggaccgtacttgagggtgacctcaagagtctggccgaccttggcttccttagcagtgaagtccttgatgtagccttcacgcttcaggatctcggcgatgttcgccttgaacttggagtacggcatatccacggtttcgtgcttggccgcgctcgcattacgcagacgcgtaagcatgtctgcgatcggatctgtcattgtcatttgggcttgttgccctttctcgctatggtttccgccgccctcacgcttcttctagaagcgttcgggccgcggaccttcagcgtcgatgtttaccaactggacttcgtaacgccgggcagttcaccgcggtgagccttctcacgaaggcagatgcggcacaggccgaacttgcggtagacggagtggggacgaccgcagacctggcagcgcgtgtaagcgcggaccttgaacttcggcttgccggccgccttgttcttaagagcggtttttgccatatcagttctccttgaaggggaagccgaggtgcttcagcagcgcgtaagcttccttgtcgtccttggtggaggtcaccacagtgatgtccataccgcgcacgtgatcgatcgaatcaggatcgatctcgtggaacatggactgctcggtgagaccaaagttgtagttgccctggccatcgaactggtggccgttgatgccgcggaagtcgcggatacggggcagcgcgagggtcagcagacggtccaggaactcccacatgcggtcgccacgcagggtgacgtacgcaccgatggcctggccttcacgcagatggaactgcgcgacggacttcttggccttggtgatcttcggcttctggccggtgatcagggtgaggtccttgacggcaccttcgatgagcttggagtcgcgggcagcggcaccaacacccatggagacgacgaccttctggacacgggcaacctgcatcgggttggagtacttgaactccttctcgagctcaggaatgatctgctcgttgtacttgaccttcaagcgcggggtggccggcgcttcgacagtagtatcggtcatgccagctcctttccggacttcttggcgacgcgcacgcgcacggtcttcaccttgccgtcacgcgcctcttccttaacggtgatgccaacgcgggtcggctgcttggtctccgggtcgatgaccatcacgttggagcgatggatcggagcctcagtggagacgatgccagcctgctggccctgctgcgttgcacgcacgtgcttcttgacgatctgcacgccttcgacgattagtcgatcgttggagagcacctgcttgacggtgccttccttgccgcggtccttgccgcggatgaccttgaccaggtcgccgctcttgatcttggctgccatgtcagatcacctccggggcgagggacacgatcttcatgaacttgtgctcgcgcagttcacgaccgaccggtccgaagatacgagtgcccttcggttcacggccggagccgagaatgacggcggcgttctcgtcgaacttgatgtaggaaccatccgcacggcgggattccttgacggtacggacgacaacggccttaaccacgtcgcccttcttgaccgacccgccaggaatggcgtccttgacggaggcgacgatcacgtcgccgatgccggcatagcgtcgcttcgatccgccgagcacgcggatggcgaggagttccttcgcacccgtgttgtcggcgacatgaagccgcgtttcctgctgaatcattgattctccttagccgagctggttctccccatttaccggggcatcgtggttgcccataatgccccggtaaatggcgagccttgccgaactttacttacttggcgcgctcgataatggattcgagacgccagcgcttggtcttgctcagaggccgagtttccataatactcacgaggtcgccaatgtgggcgtcgttgtgttcatcatgggccttgaccttgctggtggaacgaacgaccttgccgtacagcgggtgggtcgaacgctgctcgagctcgacggtaatcgtcttgtccatcttgtcggacacgacgtagccgcggcgaaccttacggaagttacgctcttcagccataatcacttctccttggattcggtagcggccggctcctggctgatgccaagctcacgctcgcgaagcacggtgtacatgcgggcgatgtcgctcttgacagccttgagacgggcggtgttctcgagctgaccggtggcgtgctggaagcgcaggttgaacagctcttccttggacttcttcaagaagccttcgatttccgcgttggtcttctcgttgagattcttgatggagtaatcagcggtaccgactgccatcagatatcaccaccttcacgtgcgataatgcggcacttcatcgggagcttgtcgatagcgcggcggagggcttccttagcgacgtcctcggacacaccaccgatttcgaacatcacgcgaccagggcgcacgttcgcaatccagaactccggggcacccttaccggaacccattcgggcaccgagcgggtgcttggtcagcggacgatccgggaagatcgtaatccacacgcggccaccacgcttgatgtagcgggtcatggcgatacgcgcggcttcgatctgacggttggtcacgtaggccggggcgagggactggatggcgaaatcaccgaagttgatctcgttgccgcccttggacataccagaacgcacagggcggtgctgcttgcggtacttagtcctcttggggataagcattcttgctcactccttcgtttctgcagccggagcggcctcagcgggagcctcagccttgggggcttcggcggcctgcggggcggcggaacggttgccacggcgcgggcggcgatcgccaccacgacggccaggacggttgttctgctgagcctgctgctcttcgaactcggattcggtcatgtcgcccttgtagatccagaccttgacgccgatacggccgtacgtggtcttggcctcgaagaagccgtaatcgatgagggcgcggagggtctgcagcggaacgcggccctcacggtagaactcggaacggctcatttccgcaccgccgaggcggccggagagcttgatgcggatacccttggcaccggcgcgcatagcgtcctgctgggccttacgcatggcacgacggaaggtgacgcggttggtcagctgctcagcgatgccctgagcgacgagctgggcgtccagcgcggcgttcttgacttcgaagatgttgagctggacctgcttgccggtcagcttctcgagcttggcgcggacgcgctcagcctcggcgccacgacgaccaatcacgatgcccggacgggcggtgtgaatgtcgacgcgaacgcggtcgcgggtgcgctcgatgacgatgcgggacacgccagcgcgctcgaggtccttgctcatctccttgcggatctgatcatcctcaagcacgaagtcgcggtagcgttcgccggccttgttggagtcggagaaccacttggagcggtggttctcagtgatgcccagacggtagccaaacggattgatcttctgacccatctttagcgggctccttccttgttagccacgacgaccgtgatgtgggaggtgcgcttgttgatgcgagcagcgcggccctgggcacgagcgcggaagcgcttgagggtcacaccttcgtcaacgtaggtctccttgatgtacaggtcgttctcgcggaacggctcgccggccttgtcggccttcacacgagcgttggcgatggcgctctccagggtcttgcggaccggcagggccgcagcctgaggggcgaacttcaaaatggtgacggcttcggtcgccttcttgccgcggatgaggtcgaccatgcggcgagccttgcgcggcgtcacgcggacgtgacgagcgattgctttagcttccatgttctattccttatccttagcgacgggccttcttgtcgtccttcacgtgacccttgaaggtcttcgtgggggcgaactcacccagcttgtgaccaaccatggcctcggtgacgaacaccgggacatgcttgcgaccatcatgaacggcgaaggtgtgtccgatgaaatcaggggtgatcatcgaacgacgggaccacgtcttgatgacgttcttggtgcccttctcgttctgctcgtcgactttcttctgcaagtgggcgtcgacgaaggggcccttcttgatgctacgagtcatcttctcgatactcccttacttgcggttcttgccggacggacggcgacgaacaatcatcttgttcgaagccttcttcggacgacgagtacgaacctcgcccttgccccacggggagaccggcggcttaccaccgcgggtacgaccgccgtgcgggtggtcgaccgggttcatggactcaccacgggtgatcggacggcggccgatccagcgggcgcggccagccttgccgagctgaatgttggcgtggtcctcgttgccgacctcgccgacggtagcgcggcagcgcgcgtcgacgttgcggatttcgccggacggcatacgcagctgagcgtaggcgccatccttggcgacgagctgaacggcagcaccagcggaacgagcgatcttagcgccgcccagcgggcggagctcgatggcatgaaccacggtaccggtcgggatgttcttcagcggcaggttgttgcccggcttgatatcagcctgagcaccggtctcgatgacgtcgccctgcttgatgcccttcggcgcgatgatgtagcgcttctcgccatctgcgaagtgcaggagggcgatacgggcggagcggttcggatcgtactcgatctcggcaaccttggcgggcacgccgtccttgtcccaacgcttgaaatcgatgagacggtactgacgcttgtggccgccgccgcgatgacgggaggtgatacggccgtaagagttacgaccgccggtcttggacttcttgcgaaccagcgacttctcaggcgtagaacgagtcagctcggagaaatccgagacggacgcgttgcggcggcctgcggtcgtcggcttataaacgcggatagccataatgtagttcttcctttaacttttctcggctaaccttcagttaccaaagatgtcgatcgtctggccctcggcgacggtcacgatcgcacgcttctgggaagcgcgctggccgaaaccggtgcgagtgcgctgcttcttgccagcgcggttgagggtgttgacgttcgtcaccttgaccttgaagatctcttcgattgcctgcttgatctgcaccttgttcgcatccggagccaccacgaaagtgtactggccacggtcggaagcggcgtagctcttctcggagacgacgggcttaagaatcacgtcgtgagcgggcttgtgaatagcgaccatctaaatcaggcctccttcggctcggtcttggcagccacgaaagcctcgaaggcttccttggtgaagaccacgtactgcgaggtaatcacgtcgtacgtgttgagctgatcgacgaaaatcgggtgaacggtcgggatgttgcgcacggagagccactcgttgatgttgtcgcgagtgaagacgaccgtggtgaacttgtccgcggtgatcggggccagagcggcgacggcggccttggtggacggctcggtgataccgaactccaccacggcaacgcgaccggcgttggcgcgatcggacagggcgtagcgcagagctgcggccttcatcttcttgggggtgcgctgagagtagtcacgcggctgcgggccgaacacggtgccgccgtggtaccactgcggtgcacggatggagccctgacgagcacgaccggtgcccttctgcttccacggcttcttgccgccgccggaaaccatgccacgagtcttggtggcgtgggtgccctgacgagcagcagcgagctgagcggtgacaacctggtggatcagcgggatgtgagcctggacatcctcggcggaaacgccgaagagagcctcaggagcttcaacggtgccggtggcctggcccttggcgtcggtgacgttcagagtaacgtttgccatggtttatcaggctcccttcacagccgagcggacgagaacgatgccgcccttggggccaggaatggcgcccttgatggcgaggatgccgttctcgacatcagcggagacgacggtcaggttctgggtagtggcggtcacatgacccatgcggccggccatacgcttgcccttgagaatacggctcggagtggcgcatgcgcccacagaaccgggacggcgctcgttcttgtgagaaccgtgagtacggcggtaggacttgaagccccaacgcttgatggtaccggcgaagcccttacccttggtggtgccggtcacgtcgacctcagcaccctcttcgaacaggtcagcggccagttcctggccggcctcgaactgatcgacgtcgtcggtgcgcacctcgacgaggtggcgacgcggggtgacaccggccttggcaaagtggccagccagcggcttggtcaccttggtgggatcgatggcgccgtagccgagctggacagccttgtagccgtcagattcctcggtcttcacagcggtcaccacgttggtggacacgtcgacaagagtgacgggcacgaagaagccgttctcgtcccacacctgggacatgccgagcttcttgcccagcagagccttgcgattagacataatgcttcctcctcccttacagcttgatttcgatgttgacgtccgcaggcagatcgatgtgcatcagggagtccacggccttgggggtcgggtccacgatgtcgatgaggcgcttgtgagtgcgcatctcgaagtgctcgcgagaatccttgtacttgtgaggagaacggataacacagaagacgttcttctcggtcggcagcggaacggggccaacaacagttgcgcccgcgttcgtcaccgtttcgacgatcttcttcgccgattggtcgatgacctcgtggtcataggacttaagcctgatgcggattttctgtcccgccattgccgtccgccctttctagcgatgttcgttgtactgtttaccaacctgcttctagggcaccggcgcgcatggcctcccttggacatacgtcctctggcggtcatccgacatcagtgcgcggtttccggctgtcacttcacttgaagtggctcccggcccgcgctcgcttttttaattccaatttgcgagcccaaatcaggcaacttgtttattcaagcattgaggtgggacagtggagttcgcgcgtgtcgcgctcatgccgttcgtattacctcgcggcatagccgctcggcgtctgttcgattgtcgcaatgcaggtctcacatctttcttattgagaaccattcgctgcgataccatgacagatatgacttcccgccgcaagactcttaaacgcgattggttcgacaaccaacctggcgcatgggtaatggttatgctgcccgctgtggctggcttctttatcggcgggcctaatcttgatacgctttggctattggcgacgtgggccgtgtgctattgcgtgcagttcagcgccgcgcactggttcaaagcacacttttcacgccgttatctgccgccgatgctcacttatgccgtagcgctcatcgtcatcggcttgccattcctgattacgcataccggcatactgcgttgggctcccttatatatagtgctggttgcgctgtcgatgctgtcctcgtggctgaggagggagcgctcgctgtggggcaatgccgtgtcggtgattgccgcgtcggccatggccacggtgatcgcgtcgtttggcagcactgttgagacggcatgtgttatgcccatcaacgcagcacatgcctcgtgcgcagccgctgatgtcaccgccgcacgcgccgtgattcggaatatgccagatttgagccagatattcgaccttcacgcctggtggcccgcgggttcattgcccgtgagcgggctgattgccaccgtgctgtttgcgctgacgcagtatgggtcggttttggtggtcaaaaccatgatccgggaacgcgggaagcgttcgtacgtggcggcttcgtgggtatggcatgtggcgctattgctgctagccgccgtgccggctggacgcagcccgtatctgattgcgatgactgtgctgctgttggcccgcgccgttgcgttgccggtggttacacgacgcacaaccttgaagcccgtggtgaccggcattaccgaggcgtttgccagctttattgcttttggctgcattattgcggcgatttagcgacgcttcagcgactccatggggcggtacctgctggctgagggagcgccacatatgcaaaggagcccggcccctgtaatggggtcgggctccttgtgtcgcgctatgcagccactaagctgcaacaccgcggttggtggctactgatggtgccaccaaccacaaaccgcctgcaatcaacgctcggaggcttcctcagtggcggcctcaccctcgcgctcgatgcgcagcttgtggccttccgcctgggagacaccgtagtaagcaccgacggcgatgtccttcatgtcgttgatcagcgggatgcgcgggttggccggggtgcactggtcttcgtaggcgcgcatgccgatctgatcgagcacggaccagaagtagtcctcgtccacaccgcaatcctggaagctcttgttcatgccgagcttgttgtcacggtagtcctcgacggccttcgccaggttctccacggcttcggccggggtcttgccggtgtcgatgccgaggttgcgggcgatatcctggtagcgttccggggcgatgtacttgttgtacttcggccaagaagtgggctcctcaggaatctggccgttgtagcgaatcacgtacggcagcaggatggagttggtacggccgtgggcgatgtggcacagggcaccgatggtgtgggccatgccgtggcacatgccgaggaacgcggagccgaatgccatgccggccatggtggcggcgttgtgcatcttctcctgagcgttggtcttggccaggccgggctcgccattgacggactcagccaggttgtcccagatgagcttggccgcgtgcagggccatgccgtcggtgaagtcgttcgcgtacacggacacgtaggcttccatcgagtgggtcagggcgtcgaagccggcgtcggaggccagcttgcgcggctgggtgcgagccagcaccgggtccacgatggccacggacggagtcagcgcgtagtcggtgatcgggtacttgtagccggtcttgtgatcggtgatcacggcgaacggggtgacctcggaaccggtgccggaggaggtcgggatgcacaccagcttggccttcttgcccagcggcgggatcttgaaggcgcgcttacggatatcgaagaacttctcgcgcacgtcggagaaggcgatttccgggtgctcgtagagcagccacatgatcttggaggcatccatcggggagccgccgccaaccgcgatgatcgtgtccggctcgaactcctcgcgcatcatctcagcgcccttttcgacggtctcgacggagggctccggctcgacgtagtcgatgatgcggaaggtcacacggttggagcgggcgcgcagctggtcgatgatcttgtcgacaatgccgagctgctccatgaccttatcgcacacgatgacggccttctcgatgccgtacatgtcgcgcaggtacttgatggcgttcggctcgaagtaggtcttggccgggatcttgaaccactgcatgttgttgttcctccgagcaatgcgcttgatattaacgagattcacggcctgcacgttgccggacaccgagttgccgccgtaggagccgcagcccagggtcagcgacggggcgatggagttgtagatgtcgccgatgccgccaagggaggaaggctggttccagatgatgcggcaggcgtgcatacggacgccgtactcacgcacgagctcctggttgttggtgtggatggcggcggtgtggccggcacccagcttgagcatcttctcgcacatctcgaaggcctgctccttgttgtcggccttgagcacggcctgcaccggagcgagcttctcgtgggtcagcggctcgtcgtcggagacttccttgcactcggcggccagaatggtggcgtcggccggaatctcgaagccagcagccttggcgatgaactgaggggacttgcccggcaccgcggagttcagcacgggcttgacgccggaaccggcagtgcagccgaacatgtactgttccagcttggccttctcttcagcgttgacgaagtaggccttacggaccttgagctccttgacgagctggtcgtagacgtccttgtgggcgatgatggcctgctcggtggcgcagatcatgccgtaatcgaagtgcttggagagcaccagatcgttggcggcgcgcacgatgtcaacatcggtgtcaacgtaggccggggcgttgccggcacccacgccgagggcgggcttgccggaggagtaagcggccttgaccatgcccggaccaccggtggcgaggatcgtggccacgcccggatgcttcatcagggcgcctgtggcctcgatggacggatgctcaatccactggatacagttctcaggagcaccggcttcgatggcggcgtcgcgcacgatcttagcggcttcaacggagcacttctgcgcaccggggtggaagccgaagacaatcgggcaacgggtcttcagggcgatgagggacttgaagatggcggtggaggtcgggttggtgaccggggtgacgccggcgaccacgccgacgggctcggcgacctcatcgatgcccatcacatcgtcttcgcggatgatgcccacggtcttctggccggccagatagttggtgacgtgctcgcaggcgaagatgttcttggtggccttgtcttccacgagaccacggccggtctcgtcgacggccatcttggcgagaacgaggtgcttgttcagagcggcgatggatgccttggcgacgatacgatcaacttgcttctggtcgaggttctcgaattcgtcgagagccttcttggcgcgggcaaccagcgcgtcaacctcggcctcagctgcggcctgcttctcttctggggtcggcttggtagcttcgaccttcttctttgcttctgccacttggggtcctcctcgatcttcttggggtatatggcaaagttctgggccatcgcctcgtcacctcagttgcaccagcgggataccgcctcagtaaccgaaaatgaccggtgatgcgttgtcacattgcacatgtgacctgagccacaatataccgaacggttcggcacgatgcacacgcacaaaatcgacggcgtttcacgtgcgatattgaacagtttttgttaagagttgtgcgagatatcgaacaaattctcactttattcggcgatttggtactttttgttcactttttaccgaaaatcacatgcctgcaaacaacgcaatccgacaacttttttaaatcaagtttccaaaagtactcattttctccacatttctagaaaattggtttaaaaaagtacccaaatcgcctacaaatatacgatttttgtctcacaatctccgcgtcgaggcacatgaaagccactttcataaagtatacttgcatatatctcatcgcacaaaggggcaaatatgagggcaatgccatcaactgcagtgaaagcgcacaaccgcagtgccatgacccagtatctgtatggccatagccatgtcaccaagcaggaactggaacgcgagctcggcctcagcctgcccaccatcacccaaaatctgcgcgccctagaagatgacggactcatccgcaaaggcgaactgcaggattccaccggcgggcgcaaggcgcaaaattatgagttcaatcccgatcatcgcactgccatcggggtagtgatgcggtccaacgaactgcgcctgtgcgcgattaacctgtacggcaacgtcatcgaaaaacgcaacgatgccctgccttaccgcaacaccaacgtttactaccagcgtatcggcggcatcatcaacaacttcgccgccgacgtcgaaaagaagcacggcaaggtgctcggcgtctcgttcgccatccaaggcatcctctcccccgacgccaccaccatcaccttcggcaccattatgggcaacactgggctcacgctcgaaaccatcagccaatcggtccattacccgtgcatgatgatccacgattccgatgcctcagccatggccgaactctggttcgactccacgctcaccgatgcggtgtgcgtctatctggagcgacgcccgggcggcgcggtgatcgcggggggcaagctgtatcaaggcccgaaccagtgcaacggcgccatcgaacacatgacgctggtgccgggcggccgcgaatgctactgcggccagcgcggttgcatggacacctactgctcgccggagaccttgcccgaggattacgaaagtattcccggcttcttcagcgtgcttgagcagggcgaacggcatcatcgcgagcgcatggatgagtggctggattacgtggcgcaggccatcgtcaacgcgcgatccatcatcgcgggcgacgtgattgtcggcggtgaagcagcccagcatcttgaagacagcgacatcgaggatctgaaggcgcgcgtcatcgcacgcagcccgttcggcaccgaccatttcaatctgcgcaagagctactgcgccgaagaccagaacatcatcggtgccgcattgcgattcgccgagaattatctcgacgatatctgtggtgctgcggtacgcggctgatttccgcctaggcggcagcggtttcgggactcatggagacagtcatagaacaccaatcacggcaaaccggatgtcaccagccatggccaggcatacggccaccgcaagcacgaccattaccgcagtcactaccggccataccgaattatcattcattgctgcctccttggagccgatgcactttatgcgcatctaaccacttcgttgtattttcaagcctaaacggcagcattggccctatctgataccaagaaacccacttatggtactttcttgcacggatccgtgacaccgcccagaccggggcggcaatcaatgttctcggcgatattgagatggagtcataccggtttcttccagaaaccgacgattgaaattcgaggcattcgtatatccgctcaactgttgaatcttggcaatgggcatgtttgtgcaagtcagcaaacgacaagcacgccccactcgaagccgtcgaacaaaatcagcaaaaccgatgccggcaactcgcttgaagaagcgagaaaaggtggatacgctcatcgccgccgcatcagcggcaccttgcaagctgacctcatccagatgtgtggaaatataggtgatggcggcgttgatcccatcctccgcgccaaccgcaatctctggattgtattccggcgttaccacggtctggctttcctgcgctgatgcctgctcgaataccgtcagaatagcaataaggtcggcaacccgtctaactggactatgttctcccatggccactaatagctcgccggcctcacgtgccgaatcaccgaacagcacaagtgcatgctgcgaacggcgcaataccgtctcgaaaccggaagtctcgggaaaagcggcggtcaatagtcgcatagtctgcggacgtatatggcataacacatcacgatgagagagccgttctccaggaatgatatccgacaaccaattatgaggcagattggatccgatcatcgccacatgccccggcacgaatggcatgagtccatcccccgccatgagttgtccacttccctcacggataagatgaatttcgatttgtggatgataatgccatttggccagagagctcggatacccgtggcttgaccaacgtatggccgcatccccatcgggcacaatcacttccagcgagcccgcatccgaatgaggaatcgcagtcaagtttcgcgcatccatcgcagacctccttgtcaacgttgcgcagtacagctcgccatatttcgtactttaccgatggaacaactacggcgagatgattgcccgccggaatcctacggatatggcacataagtgcgggcggaaaaagggaaacgccaacatatgccgcaggatttcatcgggcaatcatctcgtcatcaacacgtcacagattagtctcgattgaccgtaatctgcaatttgatatcgcccggacgaccctcatccatacggtcgaaggcagccttggcgtccttcatggcaaacgtgtcagtgatgaacggcttcaggttaagtcggccgctatcgaccaaatcgatggctttctggtacacattggcgtaacggaagatgttctcaatacgcacttcggtggcctgcagctcggtcacgtcaatcggtaccgggttgaccggaataccgacgagcaccgcgcaaccgcccggggcaatcagcttccagaacgtctcataagctttcggcgcgccggaacactcgaatgccacatcagcgccccacccagcggtctcttcgcgtacacgttcaaccaagtcctccgtcgtcaaatccacggggataacgcccggaatctggccgataatacccagcttgatggaagacacatccgaaacaagcaccttggaagcgccaccggcgagcgcagcagaggcagtgagcatacccactgtgcccgagccggtcaccacgcacacatcgccgggcttgatgcgcgccttggtggcagcccacatgcccacggcggtcggctcaagcaacgcaccttcgccaaagctcatggaatcaggcagatggtaggtgaatgcggccgggtgaatgacctcctcacacaggcaaccgtcaatcggcggagtagcgaagaaacgcacagccggatcgacgttgtacatgcccagtcggctggcccgcgaagtcatatccggaatgcctggctcgagggcgactcggtcaccgggcttgaaatcagtgacgccggggccgacctccaacacggtgcccgctgcctcatggccgagaatcattggctgctcaacaacatacttgccaacacgaccgtgcgtgtagtaatgcaaatcagaaccgcatacgcccacggtgtggggtgcgatacgcagctcaccggggccgggatccttgacgtccgggacctcacgcacattgatgacgccctgctcttcgagaacaactgctttcatggtatttctccttatattggttgaatttatttttttgagggtcttgtattgttggtttttgacgagaacagtcagcgagcaccgctcagttcgccgccactttgcgggtgatgcccggctgctcggggcgaatccagaatgagatgaccgagccagagatgtagcaaatggcatatgcccagcacactccggcaaaacctacggtattgagcagtaccgtggcgatgaacggaccacagaatgtggtcaggcctgaagcgaggttatgtgcggaaaccgcagcgcccttgtgctcaggttccagagcagggaatactgcgcccatcggtacgaaagcggaaatacccatgccgagcaccacggcgcacacatacataaatggcaggttgtgcccaaacagctgcggcacatagtacatggcgagagtaccgagcgcggagagccagcagccccaccagcgcatctggctcatccagccgaagcaatcgcccatacggccccagaacacattgccgaatacggtgacgacgaacagcagaccccagatggtggaccattcggtgacctggtaccaagctccgccgccgtttgtatgcgtggcgagatacagcggcataatgaccggaaaaccgtacaaagtgagattgcaaatcacacgcaatacggcagcaagcgcaatctggtggttgtctttgagaatggtcacgccgcgagagagttcacgaagcttatccgaagagctcatcgtgtcaagattggcgttacgggttttcggcacaaaacacagacagataatcatgccgacaatcgagaacggcagtgacacccacagcgaatagtattcaccaatcaccggcgtgatgaacgccggcagataggcgccaaacacaccgatgccaaaggaataggaagtccagaaccagcccatggccgatgccagtttgccgggatccacagtttgcgcaagcaacactacgaagctgtagataaatagcggatagcccatgcctcgcaacatatacgacgccagcatcagcgaataactgtggctaggcaatgccacaccgatgaataccagatgcagcacgatccaagaacccgcgccaataagcatgatgcgcttggctccgaacagttcggccagcacgcccgaggaccagccggcgagcgccgcgaccaatccgtacatcgtaaacagcagtgatgcctgcgacgagctgaatccctgatcgacgacatacttggacaaaaaggtcagttcaaacccatcgcctgtcatgaacactgcgatcgccaagaatcccggcagtagttttcgcgccagtccttgtgccatgaccgtctccttttactacgcaaacttcgttgttttcatccgcccaactttggagcgttaatacaagtttcgctgcgaaaatagcagtgttttggcgcgaaaacagtcaagaattgatactttcttgcatggatgttgttatgcccagcgtgccgctcattgttgtaacccagcacaatcatcaggcactaaaaaaacgaccggcgcatgtgcaccggtcgttgaatgttagttattaggccagcccgtaataaaggctgagtattatattgcggccactatcgacacgcatattgcgcgcgaatcgggcgcatcggagccactactcctccacaatctggcagaattcgatggtctcgccgttggggccgtagatgttgaagtagcggatgccatgcttccagaaactcgggatggactggatctcggtgtccttgaagtccacgccgagcgccttggcgttctcgaaggcggcttcgatgtccggggtgtcgaaagcccagtggttgatggcgccggtggtcatcggggcggggtcgccttcccaggtttcaatggtcaggtggccgtagcgcaggaaggcgcaacggttctcgccattcatgaacagtccggcgagctcaaagcccataacctcgcggtagaacttgatggtctcatccaggtctttggcaatcatgccggaatgctggaggtcggtagtgaacgcggtcattggcttagccatgtgattctcctttgaatgtggtggttggataaaggttaaggatagtcggacaaggtatgcggcgcggcagaaccatgccgcactcctagtcaattctcgatactttcttgctgacgcaacatgatgttgcgatcagttcgcagtggcaaccatttcggcggccacggttacttcgggcagctaaacgtgcacggatgcgctgtcggtaggttccgaggactcggaggactctgcggatgcaacctttgcgcctttgatgcggtggcctttggcgtcgaagccgggctgctgcgggcggatgaacaaggtaagcacgaaggcgagcacgtataggccggcgtatgtccagcacacaccttcatagcccacaattggcagcaaaatggtggcgatgccagggccggcgaacgtggtcagaccggcggcgaggttgtatgcggacagcgccgcgccctgcttgccgcccgcgtacagggtcatgatggtgggcagcgacgagaacgcgcaggtgccgatgccgacgatgaccgaagcgacgatcatcataatggcattcgcgccgaaccactgcggaatgtagtagaacgccaccgagccgaccgcgagcaccgcgcagccgaaccagcgcatcggccatacccagccgaagcggtccatgaaccagccccagaacgtgttgaaaatcagcgtgatcacgaacacgaagccccagatacgcatccattcctcggttttgaagatgttgatgccgccattgtgggtggtgcacaggtacaacggcatgatgaccgggaacccgtagagcagcaggttattgatgatgcggatgatcgcgcagatgagcaccttgcgattggtgaccaggatggtggcaccctcggccagctcggcgagctgttccttgcggctcagtccttgcgatttgacgattttgttctttggtacgaagaagaagcacatgacggtgccgacgatggagaacggcagtgcgaaccagaaggtcttgtattcgccgaacaccggcatgatgaagctcggcaggtaagcgccaaacacgccaatgcccagagagaagcaggtccagaagaagccggtggcggaggccaggcgggcggggctgatgtattgcgccatcaggaccacgaagctgtagatgaacagcgggtagccgatgccgcgcaaggcgtacaggcccagaatcagcgaatacagaccactcgggatggcgaccccgagaaacagcaggtggatgccgatccaccagcaggcaccgaacatcatgatgcggcgggcaccgaacatttcggcgagcacgccggcgcaccagccgccgagggccgcgaacaggccgtacacagtgaccagcagggaggcctgcgaggacgagaagccttggtcgaccatgaatttggagaggaaggtgagctcgaatccatcgcccgtcatgaagatggcaacggcgaggaagccaagcagcaacacacggggaataccgaatttttcaaaaaagcgaatcatgggttgactccattaacatcgttgtcagtagaggtggtgcagggaaaaatgcggccgccggaagaaaaagggaaagccggcggccaagctatattggcggcgaaaaccgtgagacgaaacctcttccttccgctggcgggaggtggtgcgcagcaccggagggtggtaatacacgccgccggatgcctcccctcagtcggctccgccgccagctcccctcagggagaggagccggcaaagtgccgaaactactcgccgaccttgacgacggccttggagacgccctggatcttgccgtcgaggaagtcctggacttcttcgagtcccagttcgtggctgatgagcggtgcgacgttcatcttgccggattcgagcaggctgatggcgtctttgaaggtgagcgggttgatgaaggagccctgaatggtcagctgcttcttatagatatcgtaggtgttcatctcgaagtgcgcctcctgcgggcccacgccgaacatgagcacctgcgcgcccttcttggcggcggccacggcctgcgcctgggtggccggcaaacccacggcctcgatgatcacgtcataggattcggcaggaatggcctcgcgcgtggtgttgtagacgttcgtgacgccgaacagctcctggttgcgcttgagcttctcatcgaagatgccggccaggtccacctgatgcacgccgtaggcctgcacgatctgggcgaagagctggcccatgaagccgtctccgatgaccagcgctttctggtaggggcgcagcttcagcaggtccacgccgtgcacggcgcaggagataggttcgatggcggcggcgtccttcagcgagacgttgtccggcagtttgtagactacggtggccggtgcggtgaactgttcggccagaccgccgtcacgcgtgacgcccacggcggaaagatggtcgcacagttcggggcgctgggtcaggcagtactcgcactgaccgcagtagatgttcggatcgacggccacgcggtcgcccaccttgacaccagtgacctcggaaccgatggcggccacgacgccggagttctcatggccgagcacgatcggcggcacggcggcggccgaaccggggcggccggcgtacaggtcgtgatcggtgccacacacgccggcgtaggcggtgttgatcagtacttcgttgggctggatttcaggagtgggcaggtcctggatttcgaattccttgacgccggtgagcacaagagccttcatgatgggtcctttctacggtgaaagcgcgccactgcgatgagcaaggttgggccgggtgaccgggtggctgggtaaccaggtgaccggccggcaggcctatctgcatggcgattggtcgcgtattggtttcgttcatctcgctgtctttgcgaggtgttgatgaacagcataacttctttatctcagttttgcaaattatttttataaaactactttcattcggcgtgttgccttggaaatcaagggcttccaccaaaagtgacaacacgtctacaatggaggtatgaaaaacccaccgttgcatcgttacgccactcgcccagggctgtacttcactgacgacggtggggctgacgtcgttgttcgttccgaaactgccgatcaggtttggctatgcgtactggagcccattgatgagcccagcgctttcttccaagacgccatccgcctgttcgaggacccgaatatctcctttatccagcagattcatgagttcccggtatgcacacgcattatcgaacatttgtatctgcgcgagaccttgttccgcatgaccgggccgaactacggcctgtggtacgtgcacctgcccaaagcatgggacggcatgcgttatggctaccgcgtggacggcgcatgggacccgaaacacggcgtgcgcttcaatccatacaaattcctgcttgacccgtatggcaagggcatcgacggctccatggagctcacccccgccgccttctcctatgaatgcgatgtcgtggaccgcaaggtaatcggctcggcatacggtgccatgagcaccgtagactcgctcggccatatgccggtgtccgtggccatcgacgatcgcgatacccataagcatgagggcgacccgcagcacccgcatgtgccgtggcgcaaaaccgtcatctatgagatgcacgtcaaaggcttcaccgccaacgcaccgtggctgcccgaatcattgcgcggcacgtacgccggactcgcacaccccaccacgctcgcctatctgcagggtctaggcatcacatccatcgaactgctgccgattatggccaagcaggacgagctcttcctgcaagaacacggccgcaagaactactggggctactccaccctcagctacttcgcccccgaaccctcctacgccactaaagccgcccaggagaagggcgcggccgccgtgcgccaagaagtcatagacatggtgcgcgcactgcacgaggccggcttcgaagtcatcatggacgtggtctacaaccacacatgcgaaggcggcgtcgaaggcccgacggtctgctggcgcggcctcgacgacctggcctactatcgccatcaaaaatccaataccggccgactcgaagacaccaccggttgcggcaatacgctggacttcaccaacacgcatgtggtcacctttgccatcgactcattacgatactgggccaagcgtatcggcatagacggtttccgcttcgaccttggcgtcacgctggcccgcctggaaggcgaattcacccatcatcacccgttcctctacgccctgcgttccgatctgctgctgggcaacctgaagctcattatggagccgtgggatctgggcaacctcggctggcgcaccggccaattctccgtgccgttcgccgaatggaatgaccgcttccgcgatacggcccgcaccttctggcttgaggatgtggacggcggctccgatttcgggcgtatcagtttgcaggagatgtccacgcgactctgcggctcggccgatctgttcgccaccgaaccagggcgtggcgctccggcctccatcaatttcgtgtcctgccacgacggtttcacgctgacggacctcaccagataccgctccaagcacaatgaagccaacggcgaaaacaataatgatggctcgtcggtgaaccattccgccaatttcggcgtcgaaggcgtcaccgatgatccagacgtcattgcggcacgcgaacaggcggccatgaacatgatcggcatgctgctgctctcgctgggtacgccgatgatgctcgccggcgacgaattccgcaacacgcaggacggcaacaacaacgcctactgccaagacaacgacatcacgtggctgaagtgggattggatgtattccaccaacaagacgcgcgaaatgcgccgcttggaaaccgtgtctcgactggtggcgctacgtaaatcactggacctgtatcaccacgaggacttcttcacccgactgacccagctcggcctactcaagccctcaagccgcgtgcagtggttcctgcccgacggcaccacgccgatggagcgtgactggttcgatctgggcgtacgtagcttcaccatgcgattgctgtccaacagtgaggtggacgtgtgcattgtggtcaacggcaccgctgacgaccgcacattccgcctgccgccagacactcactggacgcctaaatggtgctcggccgaaatcaacggccgtcgagccgggcatggcactcaggtcgaggaatgcgatttgaacggtgacaccaccgtctggacgcagcatgtaccggacgccagcgagacagtactcaagatggtcgaagaagtggccatgcagcgtacggaatcctcgactgagaatgaagcggataccatcaaattcgcgatgccagtaacagatcacgccgcagacggcacctcgtccgcgcctcgggatgaggtatcagctgatatgcccgatgcccctgtggatgatacaccggacactcccgtcgacgacaatgtctggaccatgccggcgctgagcatcacgctgatgaagcaggtgtgagtcacactcaagacagcgcgacacaaacacaaaggctctccgcggaattccgcggagagcctttgtatgctcggtacaggacaagcgaaattaacgcttggagaactgcggggcgcgacgtgccttgtgcagaccagccttcttgcgctccacgacgcgagcgtcgcgggtcaggaagccagccttcttcagggcggcgcggttggcatcacgatcgatggcgttcagagcgcgggcaacgccgaggcggatggcgccggcctggccggtggtgccgccgccgtcaacgaggacgatagcgtcgaacttgccttcgagcttgagcagaacgatcggggagttgacctcacgctgcagcagcttggaggggaagtactcctccagagtgcggccgttgatggtccacttgccgtcacccggaaccagacggacacgggcgacagcctccttgcggcgaccggtgccgtagcccggctcaatcgcggaggtgccggtgccagcgccagcgttggtctcggtggtgtagttggtgagctcctcttcggtctcgacaacctgggagtcgttggtgttttcagccatgattcttatctcctctcaggtttcacttggcctgctgcgagacctgggcgatctcgaagacctggggcttctgcggggtgtgcgggtgctcggcgccacggaagatacgcaggcggtcgagctgcaccttggccagacggttcttcggcagcatgcccttgacagcgttcttgatgatgcgctcggggttcttctcgagcagctcggcgtaggagtcacgacgcagaccaccgggacggccggagtgcgagtagagctccttgcccatcttgttgccagtcagagcaatcttgtcggcattgatgatgatcacgtggttgccggaatcggcgtgcggagcgtaggtcggcttgttcttgccgcgcagcaggattgcagcctgggtggcgagacggccgagcaccacgtcggtggcgtcgatgacgtaccagtcatgagtcagatcagctggcttcggagtgaaagttttcactggattaccttttctatattgtgttccgggtctcagctgcttggtgtggcttggtcagggccgcgtccaagaggcgtcgaacctcattatccgtgggctccctgaaagtcctcgatggcgagtgggatagcgctttgaaggaccccttagggaaacacaacaatccactagtatatcgccgggcttgacatagggcaactggggacactccattgggtttatggcttctcttcccctatttatggtttctctcccacccacttcggctaaccgactcacctacggtgaggcaattccctgccttctctcagctatcgcttctttcaggcctcgtctacggacagtccactggactgtccgcttaacggctcggctcgtcagagggaggtaaagcgggtcaggaattgaagatttgggcgaagcgttgggcaccgggggtgtcgaagagggtttcgagcggtaccacgttgcccttggcgtcggccagtgggatgcgccagttcgggtattcgttgttggtgcccggctggttctgcgcacgcttctcccccaccgcgtcggtgatcgaggcggcgagcagcttgcacggcgaacccttcagtgcgcggtacagcgcgtcgacgatatccgcctcgtgatcctcacgatgttcggcaaagtcggcatcaagataaccctgctcgaccagcatggccagcatcgcatcctgctcggccttggcggaggcttcgaattcctcggccgggccggtcagcaagcccagacgctcacgaatcttgacgtgctcgtattccaggtaaccggcggccggcggcaaatcgtgcgtattcacggaggccaatgcatacggacgccactgggagggggcgcggaacacgccgtcgcactgctcgaaccattcaacggcgcaaccgagaataccgtggctcgacagggaatcggccacatggtccggcaccacgccgaggtcctcacctacgaccacaccgccggcacgagaggcctcgatggccagaacgcccagcatgatgtctgagtcgtagtacacgtaagcgccatccatagccgaacggttctcgggaatccaccacaggcggaacagaccaaggatgtgatcgatgcgcaccgcaccggcacgggcgaacatgccatgcaccatattgcggtaggcctcgtagccggtggtctccagattgatcgggctcagcggcggctggctccagttctggccttgctggttgaacatgtccggcggtgcgccgaccgtggctcccttggcgaagcgctcgggattccaccacacgtcagcgccggaggggtgcacgccgacggccatatcggacatgatgccgatatgcatgccggcgtccttggctgcctgttgggcggaggacagctgctcggcggcaatccattccagccagcggtagaagtccaaagtgtccgggtactgcttgcgcagattggcgatttccggggagttgcgattgaacttgcgctcccagttgccctcctcgccgttgggcgccccccacttgtcgtagcacaggcaccacgtggcatacgcctccaagtcggaaccacagtccgccttgaattggtcgaatacgctttggcgttcggcggtacggccggccttgaagataatccacagggcgtgcatcttgctgcgccacatggcgtcacggtcgatgagctgggaatcaccgttcagcggttcggtgtcggcatgcagtccgtcgacggcattcttgtcgccctcgctgagcgtggcatattcggcgatcgcctcaggacggatgtacgtgaagttgatcaggcgacggcttaccggcagatacggcgacggggtgagcggggacaccggctcggcggcatgcaccggattgatgagcacgaagtcggcaccggtcttctgcttggcgtccaccagcatggtcttcagatcctcgtaatcgcccacgccccaggagttggaggagcgaatcgagtacagctgggccatccagccccacagactgccgcccttcatcgggtcaagcagatcgacgcgatcaggtgcactgatcaaagtggcgtcttgcacacggtcggcgaccttgacgtgcagcgtatggtaaccaatcggcagatcggcgggaatgaccacagccgcattcgaaatgaacgtaccatccaagtcgtaggcctgggatccatctccaggaccaacttcaatggtgccttgatatggctcgccattctccagcgtgatgctcgccgaaggcacgtccagaataccggtgttcaccagcacccggtcctcgctaccggcgatatgcagcacggtgggtgccaccaatcgggcgtaacgctcgttcagaatgcgtcggatggcgatgagttgggcgctctcgctggaggcgtcgatgcccagcgctgccagcacctcgatcaggacgtcatcgtctatctcgtggtagtcatggctcatgcccaaataactcgtgccgacaccgaccaacttggccagtcgaatcaacggacgggccagacgctcttcactctcggtaatctcactcatagccccagtctaacgccgtttgattgcgccacaccgtaagaaaaatgccatgattccgccaaattatgtactttttaccctcacatagtgagatatgagcgctcacaatggtggacagggggtgattgccggccaaatttgcgcggcaaaacacagcaatagtgtgcttagcggcggctttccacggcgtgccgcacctcggccgaggggtcgttggccaatttggcaagcatcgcttcggacgtattggggttcagtgccacggcacggcggaccatcgaagaaagcaccgccggtgctccctcttcggattcggtgccaagtacgcccaagaaatccaatgtctccgcatccgcagtggggtcctgcgcaccctcaagccgcatcttccagctggtgcgcttgtttttcaacgccgtatcccggaccgcaggcaccgggtccttggtcagacggccgaccagccaattcttgtcgtccccgttggcggccacggcttgacgcacggacggttcggggtcttcggagagtttgaccaatacgttcgggaacggcatggtgtcggcgaggaacacacgatcggccaccggggtgtgcgggttgccggccacagcctccaaaagtgcggtggcgcgggagaacgccgcctgatcggcacggtcaggcaacggccgacgggcgaattcggacagttcggccgggtcggtggaatggcgcagacgctcgtatgtagcggtcagcggttcgaaatccaccggagcggcggactcggctgcggactgcgcgccttggtcctgctgctgggcgtccgtgtcggttgcagtctcggccgcggcctcggttgcggcctcggtgggctgggtctgctggctggtggtgttctcgtcggtcatgatgcccagcttagtcatacaggcgtcacgcgagcggaaccggaatgttgaccatgtcaatcggagccggcaccacagcggcattgaacgcttcccgcacacgctcctcgaatcgcgcgcaatcatcctgcggcaccaccgcggtcaactcgacgttcaccgcatacgattcatcctcctgactgccaccaagctgcgccaggatctgctggaatcgggccaactgcgggtattcgaggcgaacccggtatcgcttggcggtcatgatgcgggcggcgcgggcggctttcatcgccaatgacgcggcggatgagtacgcgcggaccagcccaccggagcccagcagaataccaccgaaatatctggtgacggcaaccacgcaatcggtggtgccggactgcttgagtatgtcaagaatcggcttgccggcggtaccggacggctcgccgtcatcgctcatgcgttcggacagtcgcccatccgcgcctccgcacacggcggcatacgccacgtgtcgggctttcggatgctgctcacggatcgcggccacgaacgcgagcgcctcgtcgagcgtatcgacatgggcggcgtcgccgatgaattcggactttttttcgacgagcgaatcgtgggcgggatcgtcgggcgtgttgagaatcgtctgcatgagcgtgttccggtggtcgactggctgggtgttcgattgagcgcgaggctaggcaggactatcagcgttcggagacgacgacgttatagtcttcgccggcgaagtaggcggtcaggcaggcgatcatctggcgggtgagctccttgaacgcgccgtcggcacgccagccgacgtgcggggtcaggacgatgccgggcacatggcagatggcgtcgtcggcggtcagcggctcatggtcgaacacgtcgagtgcggcgggaacatcgcccttttgcagtcgggcaagcagcgcaccggattcgatgacttcggagcgggcggtgttgatgaacagggtgccgggcttcacatgcgcaaggttctcggcggtgacgatgccgcgcgtggcgttgttcagcggcagatggacggagatgacgtcgctggtttcgatgagcttgttgagatcgtcgaccggagtggcaccggagcgttcgaaatgctcgggcggcacatgcgaattccatgcggcgacctccatgccgagggcgcgggcgatgccggccacggtggagccgatgccgcccagtccgatgatgcccatgcgacggccggcgagttgcagtccatcgccgccggtccacgcccagttgccggccttgacgtccttatcgagttggccaacgcggcggatgagctcgaacagaagggcgaaggtgtgctcggccacggcgtgatcgccataatgttcggcgttgcagacgcggatcttcagctcgcgcgccttatcgagattgaggtagctggcgacgccggtaccgcagaacacgatgcacttgacgtgcccctgctcgctgatggtgcgcagcagatcgtccgaaatgtggtagccgcccaccagcagggcgtcggcatccttcagacgctcggctatggtcgcctcgtcggacgtgaattcctcgaacatacgcacgcgggcaacgtcgtggagcgcggggaactgggccttgatgggctcgatcatcgagtcaagcacggacggcatcacgacgaggggcagatcggtgcattcgctttgggtttcgtaaatctcggtcatgggctccacattaggaggccggcgggaaaagcgtcaccttgcggcttcccctccttgagaccaagccgagcaactattgctttgccgcctgctcctgcgtgatgttccattccttgacgacgttctggtccgcgcccatcgaatagatgacatcccagatgcgttggcgtatctgagcgtcgtaggcttcgtcccaacatgtgcctatgggatggtcgctggatatcgggcaccattggtagttgccttgatgcacgttggcggtgggcacccaatcgatgcggttgacgcgccacgaccccttgacgcccttcttgccggcgaactggatgcgtgcggtcacaccctgattgttgaccaaggtttccggcgtgttcgccgactcggtgacggcgttgcccaaaccgtagataatccacgtgccgttatagttctcgatgggctgcgcacaatggcaaccggcaccgtaaataacgtcgaaggcaccagtgtcggcaagctcatgggcttccgaaatctgccaggaatcggcgtaatcaaggtattcctgcaccgagtgcatggcgatggccaccacatcggcaccttgctcgcgggccttgttggccttgtctaccgcgcgctggatgtcgctgtcgtgattcgggtcgccgtcttcgcgcagacgatccacctgccagtcctcgtcggcggtcatgccgttgagggagaccgtgccggtgaccagacccagcttgccgccgccggtcggggaatcgatgaccaacggtttggtggagtcggcttcggttttgtacgagccggtctgggcgatgccattggcctcaagcgtgtcccacagacgggcgatgccatccgccccctgatcccaggaatggttggtggcgtgtgtgcaggcgttgtatcccacgttgcgggcggcatccgccacttccggcggaatgttgaagatcgggtacgcggcatatgggccgccgcgctgggcgatcggggtttcgaattcgcacacggcgatgtccgaagcctgaatgtactgcttcatcggcgcgaacagcgggtcgaagttgaaggcggtgccatccgtggcgttggggttcgggccttggaaatggctccacaatccctcatggaacaacaaatcgccgttgaccagcatggcgatgcagtccgtatccgggcaatccggtgaattgccgtgatgttcggtcaccggtttgggcgtgttcttcgctttattcaacgcgacgtccgacactccggcgtgtgcggggccattgccatccgtgcgatgggttgcgaaccatgcgccgatgcccagcgcaacggcgagcacgatcacgaacacgataatcagcgccgcacggttggttcgtgtcgagttggagcgatgttgcccctgcccagcgatatggctcatctttgcccgcccttcggaactcttcttctctctctagggtaccgcccatctcggtcaagtactgcggggagggaggcgatgagcaagcgattggacaagcaatatataaaccggttaatcttcaatcaccattcacgaacaccacgcaaaagtctcacttagtggacatttttctttcgtcgctcggacttttcccgacgtgccgcactcgttcgcccactaaaatggcggtttggaggcggacggacaatggcgtacctccgactccgcttaccacaagcggagaccgcccgtcctcggttatttcaggagttacttaacccggagtttccggaaaacaaaaaagttccgagctttcacccggaaccttaatcggcggagtcagagggattcgaaccctcgagccgtttacacgactaacaccttagcagggtgcccctatcggccactcaggcatgactccacgttacgcaataatgcgcaacagcaaattactgtaccacgtcctgcggatacggcgtgccgaacgacatattattgaccgtccgcgggcgcggcatcgccggagaacgtaacgataaccgcgcaaatcaccaacgccacaccgacgatttcaccaacgctgggaacctcgccgaacgccagtcccacggccaccgccatggcgggattgatggattgcattaccgaaaatgcgccggatgtggtgcgtcgcagcgtgatctgctccaccacatagggaatgaacgaggccatcagagaaatcacaaacagcagagccagcagcttcagcgagccgccgggctcaagcgcccacgtggcatcggccttggggtgaaccacatgagccacagccggcacgccaagaaacagggactggaccagccagccgatggtcacggcgatgcacagattatccagcgaattgccgccagccgccacgcgccggccggtgatgatatacatgccccacatcgacccgccgatcaaaatcgcaatcagaccatacaaaaacgtgccattgccggacggattggccaatgatatgccggccaacagcaccacaccgaccgtcgcgataccgataccgacccgctcgcgccagcttttgccggtaatcaccgccaccgaaagcggtcccaaaaattcgatagacacggcaatgcccatgtccatattgctgatggccacataaaacagggtattcatcagcaccagcgagcagccgagcagtacgaccagcccccagctgcgggcgtcgcggtgaaacagttgcgctcgcttcgccttgttccagggcctgcgccacagcagcaacagcaccgccatgaatcccacgcgataccacaccgagtacagcggatcgagctgggtgaacgcaagtttggcgacggccgtagccaaataaatcaccagtgcctcaccaatcacgataagaaccacgggaacacggttgaggataccgaccactgccttcttcatgaggtttacgctactcggagagccgggacagcgcgcagtgacttggaaggcgttacggacagtgacgcaatgtggacgattccgtggaatcgcacccaccatgcgaaacagccgcacagtgcgcaaacccttggaattccggcgatattcgacattatgacaatgagcgccgcgccatgcgcgccacatagtgagcatgacctcgttcggcattcctacaatggtggcatgagcaccgcaccgagacttgaggccgccaaacgcgattggggccacgacgagaccggatgcaccgtgctgcatatcgacatggatgccttctacgcctcattggaggtggcgcgcaaccccgggctcaaaggcaagccggtgatcatcggcaccgggccgcgcgcggtggtgtccgccgcgagctacgaagcccggaaatacggcatcaattcggcgatgccggccgcgcgtgcccatcggttgtgcccgaacggcatttttctgccagtggatatggcgtattaccgcatgatgtcgcaccgaatcatgcatgaggtgtttttgaccgtcaccgaccggttcgagcaggtttcggtggacgagggctatatggatgtgtccgccgcactgctggagtgggggcggccgagcgcgatcggcgcgtggattcgcgctcaggtggccgaacgcttccacgtgacgtgttcagtgggtatcgcctgtaacaaactggtgtccaaaatggcctcgaccaatgccaagccggacggcatgctgctgattcccgcggcccgatcggccgaattcgtgcagatgatgccattgcgtggcattccgggcatcgggccgtctttggagaagcggcttaatgcttggggcgtgcattcggtggctgaattggctcagctggatgaggctgcattgactcgtgccactggctccccggctgcggcacgtggattatgggcggcctcgcacgggttggattcccacgaaattaccacggtgcgcgaggagaaatccattgggtccgaggaaaccttggccgaggatacacgcgatatgcgcgtggtgtgtgggctactgcgttcggcctgcgacgaagtagccagcacgctgcggcgcaaggggctggtggcgcgcacgctgacggtgaagttgcggttcgccgacctgagctatcagacccggtcttttacgatggagcggccgaccgacacggccggcgtgctgtacccggaatgcgtgcggcagctgaaagtcatgctggggctaccggcctcggcggagtctgccactcccctgcccaaaactattcgcttggccggtatgagcacgtcttcgctcagtaaggcggcggctacggccgtgcagccttcactggatgacatgctcgaagaggccgacaatgcccgcggccagacctcacaggcgcgtttgcatgatgccgaggccgcactggacgctgtgcgccgcaaatttggcagcaaggccgcccagtttggggcgtgacggccctgcggcgtggcttcccgccagccgcgcgggctttccacgttggacatcaacaaacaccgggcaggcaccaagcaggcaccagcctcttggcatacgtttccccagaccaatttccccatcatctggaacaacgtacgccgagacgaagcaaacgcacggcacctcagacaaggacgaaaatagtctggaacaacatacgctagctcacacgcggacggctgcgccctcccaggggccaagctcacggttggcgagggagaccacggcgtgcgaggcgtcgtaggtggaaatcacgatatccggttcggtcaccccgtgctgcaccagttcggcagcctcacgtggcaggtcaacggttcgactggacatattgactacgaccaacaacttctcagcgtcgagctcacgggtaaaggcatagacgtgcggatcagcggcgtcaatcagtcgccagtcgccggcggccacgaccgggctgttgtgacgcagcgcaacgagttgcttgtagaaggagtacaccgaatccggatcatcgaattcaccggcggcgttgatctcggcatgattcggattcacggaaatccatggctcagtggcggcgtccggagcggtgaaaccggcgtagccggaaccgtcccattgcatcggagtacgcgcgttgtcacggctgcgcgcggccagaccggccatcattgactcagacgactgcaccttggcctcctcgaccctttgacggtaagcgttcagggactcgaggtcacggtactggtcgagacgcgtgaagtgggcgtcggtcatgcccagttcctcaccctgatagatgtacggggtgccgcggtgcatgtgcagcatcaggccaagtgccttggccgaacggacgcgggattcctccgcggagtcgtcgccccagcgggagaccacgcgcggctgatcatgattgccggtgaacaagctggcccatcctgcgttctgcacggcagtctggtaaccggccataatgctcttgaatttcggcaggtcaagcggcagcggcttccacttggtaccttcgcaatcaaaatcaacatgctcgaacaggaagagcatgtccaattcaccgttgcccggatcagtgatgtgctcgttacgctgagccgtgacgcctggcgcctcgcccacagtcaggaagccttcacgcccctcgaatacctcacgtcgcatttcagccaggaattcatcctgacgggggccgtccgcacagaacggattcgggttggaatagccctcctcgcccacaggaagatcctcaagctccgagccgtactcgcccggcagcttgccgttcgaatcggtgcgcttggagatcagggtgatgacgtccatgcggaagccgtcgacgccgcggtcaagccaccagttcatcatgtcgtacacagcgcggcgcacggcagggttctcccagttgaggtccggctgcttcttcgagaactgatgcaggaagtattcgccacgctcagggcaatactcccatgcagaaccgccaaagtaggagccccactgattgggctcggcgccgggctcgccggcagtggtgccgggacgagccggacgccaccaataccagtcggcgtgttcgtcgtctttgttcttggatgcttcaaaccaggcgtgttcatcggaagtgtgattgacaacaagatccatcacgatcttgagcccacgcttgtgggcctcggccagcagctcatccatatcgtcgagcgtgccgaacagaggatcaatgtcctgatagtcggaaatgtcatagccgttgtcgtcttgcggagacttatagaccggggatagccacagcacatccacgccaagatcagctaagtaatcaagacgcgacgtgatgcccttaagatcgccgaatccatcgccgttcgtgtcttggaaagagcgcgggtaaatctgatagaccaccgcgttggaccaccacggattgggggtggcgccattggttcgaacggaatcgggaagcacgacacgctgcgcagtagtcatgattgcaacctttctaacgaatgtgacgggaatcccggagggcggcaagaaccctccaggattccacagactgatgacgggatgagacggcttacttgttcgcgcctcgcatcacgccgctgatcacccacttctgggcgaagatgtagacgatgaggatcggggccatggccatcaggtagctggcaaacgccaccggatagttggcggtgaactgcgagctgaacacgaactgcgccagcgggatcgtctgatccgcggaattggacagcagaatcaacggcaggaggaagtcgttccacgcccacagcgcggtcaggatcgcgatggtggcgttgatcgggcccatcagcgggaagatgatggtccagaagatacgccaggtggacgcgccgtcaatgcgggccgcctcttccagcgacaccggaatcgaacggatgaagccgatggcgatgaacaggttggtgcccaggccgaagatcatatacaggatgatcaggccgaacttgttgtcgaggttccacccgcccatctgcttggccagcggcagcatgatcacggagaacggcacgaacatggctgcgatgaagaagtagtacaggaagcggaagaaccgcttgtccatgttacgggccaccgcataggccacgaacgtgttggtcagcagggtgagcacgatggcgcccacggtgatgatcgccgagttcagggccgcgcgcggatagttcaccatgttcgaggcctcggcgaagttgccccactgccagctggtgggcagggcgaacgtgccggcttcggccggggttttcagtgcggtgacgatggtgaagtagagcggcaccagaatggtcaggctcagcaccgcgaccaccgcggtcagccaccagttgatcttatggtccttgcggaacttgtttttcttgggttgtgcagcaacagcgctggtcatgatcacaccttctccttgctaccgaagaacttgagctgaatgaacgcgatgatcgcgaggacgatgaagaacatcaccgcattggcggtctggtaggcgtattcgccaccggtcaggccgccctggtagatgaggtaggtgaccgtttccgtagcggagctcggaccgccaccggtcagggcgaccacctggtcgaaggtgcctaaggcgcccttcatcgtcaggacgaggttgatggtgaagaacggtccgatcagcgggaaggtgatctgccagaacttctgccaggcgttgacgccgtcaagggcggcggcctcgtagatgtcggtgtcgatggtctgcaggccggcgaggtagatcagtgtggtgtaggccacgccctgccatacggagagcaccacgatcggcacccatgccagcgattcggaggtgatcatcgattcggacagccaccctatgcccaacgccttgccgagttcggggatcggcatcatgaagatgtacttgaacacgtagccgaccacaagcacggccagggtgtaggggatgaagtagatggcgcggaacccgttgcggaacgcgatcttggagttgagcagcacggcgatgaacatggacagcaggttcaccagaatcgtcaccacgatggcgatgaagaacgtgaacaggtaggcgtgcccaatgcgctcatcctggaacatggccttgtagttggtcaggccgatccatttgtatttgccgtagcccttggaattggtgaaggagtacatcacgccgcgcaggaacggccagtacaggaacaccatgaacaggatcatggccggaacggtcatccagtagtatgcgggatcgaccttgcgatgggagaaagcggagacacgcttcttgcgtggtttttcggcaatggcggacatggtgaacctccttactgtacggtcctggcttggatctgatcccactgcgtctgcattgaattggtgaacgcctcaacgttgccggtggtcagcaggctttgcaggctgccggccatggtcatggacgaggggatgtagtggtcggcgaaatcagcgatgcgtccctccttgtagaagtggaggatgttctgcagagcctcgtcgccggcgtaggtgtccttgaacggggtgaagcagaactgcgattcggcgtattccttgagccggtcctcgtccatcaagaattccacgaacatgcgcgattccttgggatgcttggtggtggccgaaatggtgagcacggtgtcgtcgccggcggtgagcacctgctcgtccggatcgtcggtggcgggcagctgggcgaacttcacgttgatgtccgggttgaccatgcgcacctgcggcacgacgtaggtgcccaggggcaagatggccgccttgccgttggcgaagtcctgggtggcctgctggtaagtaacgcccggattgtcctgcgtgtactggtagaactcgacttccttttccgccacgggaccccacaggtcggcgaatgtggcggtgccgccgctgagcttcgagtattcgctgatcggcacaagagtgccggccagggaggcgaacggcgcctgagtggtccacggttcggcgaggctgccttcgatcggcgtgatgccggcctgctggatctgcttcatcgcggcgatgaactcggaccaagtttcgggcaggttgtccgggtccagcccagcctgacgccacaggtccacgttgacgacgtagccgttggcgttgccagcgaacgggatgccgtacgcgcggtcggcgctggtgtcgtacagtttggccagatccttgagcagcttgaccatctgcgggttgatgttgtcgaggatctcgtcgtcggtgaagtcctggaagattcccgcggcggcgaattcgccgaagtaacggccgccgtccacggtgaggacatccggcaccttgttcttgacgaagcgcgtgcgcagatcggtggcggcatcggcggtgttgatgatgtcgatggtgatgttggggtgttccgcctcgaatcccttgaccagcttcttgaactggctgactgcctctaccttgtactggaagaattcgagagtgacgtttccggcggtggatgtgccacaaccggcgagtgcggccacgcatgcggcgccggcacagacggcggcgatggcgcgggatatgctgcgggtctttgccgccatacggttcgggcgtcgatcatgcccggaggacgaccagcgctcggtccaagacgatgcggacttcatctgctgcttctcctttcatttacacttcacgacttcgctactccgcgactgtcgtgatgtatacgttagtacccatatttattgatatcaaacggcataattacaggatttctgtaaacggttacattccgtcatggtatgattgtggccattatcgagcacccatgaggaaggttcgcgcgtgatacattccacgatctacgacgtagccgtcagggccggggtgtccgtggccacggtgtcacgaacattcgccaaaccggatatcgtcaccgaggccacgcgcaagaaagtgatcgaagcggccaacgaactcgacttcgccatctcccggtccgccaccgcgctgaaatcgaagcacacgttccgtatcgctatgctcaccggcgaggcgatcgccacctggttcgactccaatctgtacaaggggctgaccgaggtgctgcagacccatggctacgacgtgtccctctacggcattgcggacaccgaacagcgcatgtcgttcttcgacgagctgcccctgcgccgcaatgtcgacgcggtgatcgtggcctcgttcaacgtaaccatggaggagatctccaacctgcagggcatgggcgtgccgctgatcggcgtcaacgtgccgcacaacgaggggttcaacgccaccgtgtccatagacaacgccaagagcatgcgcatggtcatcaatcacctgcatgccctggggcaccggcgtatcgcctacatctgcatcgacgtctcggaggcgccgatggaatacagtgcggactcgcgcctgcagggattcgaatcggcctgtgcggcgtatgaggatatcgaacagttgaccatagccctgccccgcaacgacttcaccgtggacgaggcgatcgcgcgcatcaccgtcatggaccagccgcccacagccctatgctgcctgagcgactgggcagcgctgcccctgctgtacaagctgcccaaagccgggatcggcgtgccgaacgacatgtccctgatcggattcgacgacagcgactatgcggccgagttcgggctgaccaccattcatcaggatccgcaggccctggggcgcaaggcagcggaaaaggcgctgtcgctgattgattccgcgacgttcggcattgacctgggcgagccgttcgagaccgcgcgcacgttcctggccatccgcaataccacggcggcgccccggcggtagtcggtgtcgtcaggcgcgggccgattgcagacgttcgcaggcggaacggatggcctcgtcggtggcggtggcggagaaacgcaggtaggcgggagcgccgtagaattcgccggggctggggatgatgccgatcttggcgagctcggccatatcggcccagcagtcgccggacttggccttgacccatacgtacagcgcgccggagggcatttgtgccgaatagccatatgccttcagtgcgtcaaccagcgcggataggcggcgacggtaacgcccccattgctcgcgcacagcggctgtgtccttcagacctgcggccatggcggcctgcactgggccagggataatctggccgatctgcttgcggtattcggccatttccttgaccagccggtaatcgccggcaattagagccgtacggtagccggccatgttggactgcttggacagcgagtagagcaccaggatgccagctgccgaaccttcacacacatgtggattcagggcacatggcgtggcggagagactgaatgcggtatcagaggcgggctcgttggattcggccaccggtgcggcaggcacagacgcagcagatgcagacgcggcaggcgcagaggacgcggctgtattgcggcgcaccgaacgccagtccattaacgcatagcattcgtcggagagcaccacggcaccgatgcgacgggcagcagccacgatgtcggtcagccagtcggcggagatcacctcaccggtggggttgcacggcgagttgatccagatggccttgacgttcggaatattcacccaggaatcgacgtcggtcacatcatcgactttgaccacggtggcgccggcaagttgggtaccgatttcgtaagtcgggtaggagacagccggttggacgaccacatcgccttcgccaaggtgcagcaggctggccatcagcgccacggcctccttggaacccacggtgggtacggcggcagcgttgatggatttcagatccaccccgcgcagttcgcggaaccatgtatcgatagcggccttaaggtcggcagtgccggcggtgaccgggtatccatgggcgttgggggcgtctgcgccggcaaccagcgcctgctggacactgctcggcaccgggtccacaggcgagcctacggacaggtcgatcatgccacccggcacggttttggcggtggctttgaagccggcgatacgagaccagtcgtatggcgacgaatatgcgtggaagcccatgagaacccctttcttggacggtatgttcctaagatacgacgaaccctcggccgtgatagaccgagggttcaatccgaactatgcgctgtgtgcagcgcttatccgcaaatcagcttactggttctgcggcggcagcgcggcgacctgttccgggtctttgccgattggaccattggcggaagcgccgcccaaatcgccgacttcagcgaagaagttgacagcggcatccttgtaccaagcccactcgtccggcagatcatcctcatagaagatggcctcggtggggcacaccggttcgcatgcaccgcagtcgacgcactcgttggggttgatgtacagcgagcgggaaccctcgtaaatgcagtcgacggggcactcgtccacgcaagccttgtccttgacatccacgcaaggctgagcgattacatatggcatggaatcctccttaacaaatactgatacaagggtacgcgcctgttgggacgctcctcgctctcagccgttaacggccttatcggtttcggcggacagcgtttcggtcaggtcgcccttgccgaggcgcgcatgccagtagccgtagccgaagtagatggcgaagccgaccacgagccacaccacgaaacgaatccaggtgagcacggacaggttgagcatcaaccagaagttggccacggcgatgaggatcggaatccacgggctgccgggcatcttgaaggcgcgcggcaggtcggggcgcttcttgcgcataatcgggatggagatggccaccagcgtgaaggcggacagggtgccgatgttgaccatgtcggagagcacgccgatgtcgaagaaggcggccacaagcgccaccaccgcgccgacgacgatctgcagagcggccggggtgccatgcttgccggtcttggacaggccgcgcggcagcagaccatcgcggctcatggcgaaaacgatacgggtcaggccgagcaacagcaccataaccacggtggccaggcccagcacgatgccgaagctgatgatcttggcggcccagtcggcgcccaccagttcgaaggcggtggccagcgaggggctgtcttgcttggcgagatcggcataggagaccatgccggtggtcaccacggccacgagcatgtacatgacaatgatgagcagcatgcccacgccgatgccgagcggcacgttcttgtgcgggttcttggtctcctcagaggcggtggccaccacgtcgaatccgatgaacgcgaagaacacgagcgccgcgcccgagaggatgccgggaacgccgtacacggatggggtcatgccggtggcgaactgccacagcggctgggtcatcacgccggtgacggcggaggagccttccacggtggaggccggctggctcggcggaatgaacggggtgaagttggaggccttgacgtagaagaagccgacgatcaccacaaagaacacgatggcgatcttgagcacggtcatagcaccgtccacgcgggcgccgatcttggtgccgaatacgagcagcgtggtaaagaacgccacgatgataatcggggcgatatcgatatggaaggagccgaacgtcaggttggtgttggcgttccagcccatcaggcgcatgaaatcgttgaggtatacgccccaatacttggaaatcacggagccggccatcagcatttccagaatcagatcccagccgatgatccaggccatgatctcgccgaccgtggtgtaggtgaaggtgtaggcggagccggccaccggaatcatcgaagcgaattcggcgtagcacatcacggctgcgccgcacacgatgccggcgatcaggaagctgatgatcacggccgggccggcgtggaaggcggcggcctgcgcgcccaccgagaagatgccggcgcccacggctacggccacgcccatgattgacagatcccaccaagtcaggttgcgcttgagcttgcggccctcttcacccgtttcggcaatggtctgttcgacggatttcgtacggaacagttgcatagtgctcttcttttttctctgttgtttgcgcaccaaatgcgcacaataccgacaatcgagtatagaagagcccgcgtgtcttgtctattaataagacttagagtccgcaatatatgggattaataacccgctccatcaatcaatagcgcgattacagcacaccgacgcagaccggttcgggcaccaagtccactccgaacgcgctcttgactgcctgctgaaccgcgcgcgccaaagctgcgatatcggccgcgctcgctcccccacgattggtcaaggccagcgtgtgctgcgtggatagactggccggcgcgtccgcatcgaccttatatcccttatggcagccggcatggtcgatgagccaggcggcggacgtcttggtgccgggagtgccgtcaggcagagtcgcgtcgaacttcggcgcatcttcgggcagggccgccgcttggtcggcggtcagaatcggattcataaagaacgagccgcagctgtggcgattgtagtcgggagcaggcagaccgtcatcgccaacgggaatgccggcggcctcattgagggaggccagacgctccagatcggtcaggatattggcctcgcgcttggcggtggccatgtcgggcaaggcgtagcgagtggggtcctcgagcatacccttggcggcacgtactgcgagcacggctttgcgaatgtcggcggtggccatacggtcgcccacttcgacgccaagcgctttggcaagctgtccgtaacctaccgtgccttcggccgagtgggtcagggcaaaggtgacggagagcaccacgtaacgtggcgtcgggaagaatcggtcggccggctggccggggccggcgtacatgctggccttcagtgcggagtatcgatagccgaatcgaagatcggcgggtgtgaggtcgcgcgttgttttggtgtctcgatcccagacttccaccgattcgaccgaagtggcgacttcctgcccgtaggcaccgatgttctgcaccacggaagcgccgactgtgccgggaatgccggacagtccctcgacgccctcgagcccgagctctacggtgaaggccacgaaatcatcccaattggcaccggcctcggcattgacatgcacggtgcgatcctcgccctctaccggtgcagcctcgtccggcacagtgatgaggcgtcgggcgtctcgaaccaccacgccgtcaaaaggcttatcggaaacaagcaggttggagccgccaccgacgacgaccaagggcaggcctttggaatcggcatcctccacggcttcgatgagccccacgcgcgtggtcggctcgatgaaatgggcgatggggccgcccacgcccatggtggtgatgtctgcaaagcttgtcatggcttcctatcttagtggcgcaggtgcgatatcggggcaatcatcggctgaaacggcagaacgcccgcgtctgaacgaaggtggcgcgggatttctgccgtttctcacgcgatgcggatactgattccgcaccctgccactcgcctctggagcgaatacgcaaaaacccggccgaatgggccgggttttgtaaagctgtgatgcttgcaatcaacgagtctcgcggtgcacggtctgcttgccgcagcgcgggcagaacttcttgagctcaagacggtcgggcgtgttacgacggttcttagtcgtaatgtagttacgctccttgcactcggtgcaggccagcgtgatgcccggacggatgtcggcgctcttagccattgtcattcacctctgtgttcttaggtatagtgcgcgcccaccggttagcgggcgcgatttgtagcgaggaagaggctcgaactcttgaccttacgattatgagtcgtacgctctagccagctgagctaccccgccagagagccccgagtgagaattggactcacgacctcttccttaccaaggaagtgctctaccactgagctatcggggcgtggcggatagtggattcgaaccactgaagcacgaagcggctgatttacagtcagctccctttgaccgcttgggaaatccgccagtctgtttcccgccgcggtgtttgacctcaacaggcaacttggctatataaccacagattttccaggtatgcaaatcggcccctacgcgaaccttgttttaccgcggaattctgcggttttatcggcgtgtctcacagcgtgttttcagggcccgcttcggccctgcaaacagccccgaccaaggctgcaccccgcacttcacccaatcattttttcttatatggcgctctagaaccttgcaatggcgcggttttcgagcgatgtcgcctgtttgcgcggcacggcgcatgctggcatgctgggcgcatggcttctgatcttgtacatcacggacaatcattcgacgaccagccgctcggattcggcacgctggccattcacctcggtaacggtgtcgacgccgaaaccggcgcgatccgtcgccccatcacgctggcgaacgcctacgcgctgccctacgacccctcggacatcaactggtccagttcggacgtgaacctttacacgcgcaacgggcatccgaaccaacgctatctggaagaaaagctggcccgtcttgaaggtgccgaggatgcggtggtgctcgcttccggcgtggccgcgctggccgccacgttcaccacgttcctcaaccgaggcgaccacgcgatcttctccgacaccacctatatcgccgcctaccgcctgttgaaccagattctgccggagaagtacggcatcgaaacctccatcgtggatacctccgatcccgagaacgtacgcgcggcgcttcgccccaacaccaagctggtgcatatcgagacgccggcgaacccgacgctcaaggtctcggacatcgccaccatcgccaaactggcccacgaagcgaacccggacattctggtttcggtggacaacaccttcaacacgccgtacaacgtgcgcccgctcgatctcggcgcggatatcgtcatcgaatcgctcaccaaatacatcaacggccatggcgacgcgctgggcggctcgatcgccaccaccaaggcgcgcacggaccagatccgcttcaccgcgcaggtgaacttcggcggcatcatctcgccgttcaatgcctggctgatcaatcgcggctcggtgacactgccgctgcgcatccgccagcacaacgcctcggccttggcgattgccaagcatctcgaatcgctggatgtggtgcgtttcgtggcgtaccccggtctggaatcgcacccgcaccacgaggtggcggtcagccagctggcccgcccggactccgggttcggcggcgtgctgtcgttcggcctcgacaccaatcatgacgggcacaaccggttcgtttccaagctcaatgtgattacgtcggccgtctcgctcggccatgacgaatcgctgatcgtgttcctcggcgaggatgacgagcgccagtacctgtacccgcctgagttccaccgcggcttcttccgtctggccgtgggtctggaggatacggacgatttgattcgcgacatcgatcacgcgctggtggaggccggattcgaggtgtgagaccgcaccgcgcgcatgatttcggcctcttccgccctgctgccgccgtcagtgagtcacaagatggctcggtgacgacgatggcagggctttttacgtcggcacggggacaatacctggcggtctgccgacgatgacggcacttatcgtcggcagaccgccagtttttggaccgtcgccgacacaaaacgccgatttgccgtcggcaatggtccaaaaactggccctataacgacaccaacgcggctcagcatcggcacatcgccatttcgtggcccactgccgacgctggcctcatgccacggcactcagcgtcggtagagagacaaccattggcacagcgcgacgacgctacgaacctgcgacacggaaaaaacaacataccgtcgatctactgccgtcttgcgcaaaatgtcttaagccgctcggccaagtcgccgactgagcctcttccatagggaccccaatccgttacccagtgcagatgcggcgcaacgccgaactcaactacgttgcgcgcatgcacctttatgcatagcaggcatggctgggcgtttggcggaagcggttttcggctcccctctctgaggggagcccctttccgcctggcaagagaaaaccccgactgcccgtgggaacagtcggggttgttgaagttcgctaggcgactaatcagccgaggatggcgagaatgtcgcgggcgccgacgatgaggtagtcctcaccctcgtagtggacttcggtgccgccgtacttggagtacagcaccttgtcgccgaccttgacatccatcgggatgcgctcgcccttgtcgtcacgacggcccgggccaacggccaggacttcaccctgctgaggcttctccttggcattgtccggaatgtacagaccggaagcggtctgggtctgggcctcggcctgcttgacgatgatcttgtcttccaacggtgtgagcttaatcgacactgtgggtcacctcgtatctacttgtagttcgataatgccgcgccagaacgcctcaagaggctgacgatcacttgcgttgtccctttgcgctaggacacatcgtagcgcgattattagcactctgccaactcgagtgctaacgctgtgagagaaaatcgtcgaatcgcaacgctcagttgccgcggcgggcaagaatggagtccaggcctgcgcccaacgaatcggtggtcgccgctggcgcttcgacgtcggcacgctcctcggattcgtggaatgcggctcgctgggcggcgtttgcagcctcgtcatcggcgtccgtatcggcatcatcgcgctgctccggctcagtgtctacagcgtttccggcgctgacagccttgcctgctcgacggccttggcatcgtccgcggccttgacggctcgagcctcgtcaatcaacttttccgccactgcgggttcgacaggttccgccttggacacctgacgggtcgacttgatctccaagctttccggagcgttgtcggcgctacgtcccccacccaaagtgaaggagatgagatcctgcgaggtggacataccgaagacgtccagtgctcgggcagggcgtacgctgaccagttccgacgtggcatcggcagcggcagcggcatcgtcgcgctcatcgcgctcgtcacgcaccgtaagcgatggttcaactcgaggggcgacggacttgtccgactcaatcgacttgtctgtgcgaacggaggcatcaggtgtggcggaagattcgctggtttcggcagcggacttacggtcggcggattcatcgaccatagcagacggctcggcggcaggcttatcggcggcggactgtgcaatatcagacttctcagactgtttggcgtgctcttccgcggcctgatatgcggcggcggactgacgcaacgccttggccttggcctgctcaatctcggcatcgcgtaacgcgcggcgaatctgccgctgttccatgacctcggtggcagcatcctcaatctgctcggcaggcttctcggcaggcgcagttacggccgcaaccggttcggccttgttcacacgcttgctgtccttggactcggcagacggtttcttggaccagcccgtaccgctatgagcccgctcgtagcggaccaccttgcgctcccattgccgggcctggcgtgaggcattggctcccagcaccagcaccagcagcaacagcacgaacggaataagagcaagcagcggactgaaatgcagggggaacgatacggcaaacaccaacacggttatggcaagcaggcatacggcgagaatctgccggcggcggatggccgcgcggcgcagttcccgcacatgggcgatgtgctcagatgtcagcctcgctgacggtgttgatgctggcattgctgcccctttcgccttatgcggcttgatgtctccgaatcgtctgccgttctctgcatcaacgatatgcagggaaggcgaataacgatcctgccggtgctcgtccacacgtttcatgccgttggccgtacgtacgggcagccatacaacgataataatcgccacaatcaccagcacgacgacagtgctcagtgactcataacccatagagtcaaggataggagacgtgccgacgaactggggctttccgtccgggcgtgtcggagcggaattcttccggtcgacgcttatctggaaccggcggcggcgagtctggcggcgaacccttgccccatatcttcagccaacagcgcaaacgttacgtggtcgcgccactggccattgacatacatataccgctcgcgcagtccctcatgatgggctccgaccttacgcaccacagctaaagaacgcgcattatccggcagaatggcgatttccagccgatgcaacgcgggcccgaatgggtctccgagcgcccaatcggcaagcatggccagtgccattggcgcgaatccgcggccggcgcaccgttgatcgacccaataaccaaccacgccggtacgcatggcaccatacacgatggctcccaacgaaatctggccgacgatacgcatctggtattcgatggcgaagatcacgccgacgccatgctgctcgttacggcgctgccgctgcacccattgattgaatgtgatggagccgccatgcatcgggtcaccggattcccaaggtgccagccagtcgttgttgcgccagcgcacttcgttccagccgtcctcatcatccatggtcagggggcgcaggactatcggaaaaccgggatgggtgagacgtggcgggcggatctggtggtccagcttgaacgcctctttaatcgactggaaaactgacacggcctttattgtagccatatgaaggtcttgcgccgctaccgtggccactttcgttttacgatggaaacactagattgtgcggtatgagcgaagtgggcagtggcatgaatatcggcagcgactacagcggcacagagaaaacagagaagacggataaagcgacgctgcgccaccatatactgtctcggcgcaagcgcgttccagcggaagaacgcggagcggccggtgaattgctggtgcgacggttcccagcacacatgattcaggatggtcccacagtggcggcatatgtgtcgatgggttcggaaatcgaaacccggccactgttgcgatggctgcgggctcatggctgccacgtgttggtgccaaggttggggtctgggttggaaattggctggagtgtgctggattcattggaatcattgcgctcgatggatgcagtgggtggcgcgaacaatgccggtagctgcagctctcccagcaccgtccatcacagacccgatgagccaactggcgcagttctaccgcccgaagcgttggagaaggccgatctggtcatcgctccggctttggcagtggacccgcagggcaatcgtctggggcgtggagccggctggtatgaccgggccttggctcgccgcaagcccgcatgtcccctgattgcggtgtgctggccgtgggaggtgttggacattgatttgccggccgaaccacatgatgtgccggccgacggagtgctgacgccggagggataccgtcggcttagctcatcgggcctgttgagctggccggccggccaagatactcggcgcaagccagactgaccaaccagccacgcacactggccgatggaaccagagtggcaacagcaagctggctagtaagaccgtaacgccaatgtgtcagggcggcgactaggatatgaacggttgcgtggcatggcgtttgggccatccgcgagaaatatgactttgttggaggaatccgttgcctacctatcattaccgttgcaagaactgcggctatgacttcaccgaacagcagtcgttcaatgacgacccgattaccgtgtgccccaagtgctcgcaggagcaggtgcgcaaggtgtattccgccgtgccgattgagttcaagggtcacggcttctaccgcaccgacaaatccggcaagtaaggtctgtacacccgcttttcctctgtaaacgacggtgtcgacggcggtatgccgcggatattggcactacgggcactgtctgttgcacgggtttgaagcgttgtggataacttggcaagctagaaccacataggtcgatttggcttgcgcttacgaaaaacttcaggtcaccatggttgcatggtgaccttttcgtttattaagccgcctgcgcgcggctcattgcggcgacggcgcatggcggatgccttgcgccgactcactgctgcgttgtgcgtgggactcgcagtgctgtttgggattgaagccgtattggccgtggtggagaccgagccgatggtggtggccgcccgctcgattcgacggggtgacattattctggccgccgacattcagttggctgatatgccggtatctgcggcaggcccgtcttggacaggcaatattgaggatgtggtgggcaaggtagcgcaaatcgatatcgaagcagccgatcccatttccacgcatatggccagagatgcgcccgtagcaccgaccggcactacggtgattgaagtccgcttggccagtagcgtcgacgatgtattggccggcgatcaggtgagactggtttccgccgtcggttgcgaaggcgctgattgcacgctggccgagaacgccacggtgatgaatgtcggcaaaccggatgcgattggtgcattgggaggcaacgaccgactggtgtcgttcgcaatgccgccggaggccgcggccaaggttatggagctgcaacaggccggagcgattatggccgttgtgcggtaggaagcggaatcggccttcggccgatactgtgttttccgcagccgacaggctgcggaaaacacagtgttggggcgcacagagtgcgccccaactcctactcgcgctcgttaaaaacggcccaatgcggcggcagttcgccgaggatgcgtttgtcgtcgtcggattgccgttgttggtcggtctgcatgtctccgggctcgagtttgacaccgtcagcgtcaaactgctcagtgcccttcatcaccacgcgcttgtgcttgcgcggtgtgcgccgtgtagccgagtattccgccatggttattcaacctcgcgatagatctcaccgatacggctgacgatacggtcgacttccttatcggggttcacgaaggcggcgacactccagacggtcatcacattccagcccaaggaaatgagatcctgtgccgacaaacgatgacgcctacgcgtggattgcacggacataaagttcgcgtcatcggtctgcacggccaaggcaaacggcttgtccttcaatcccaccacgagcgggatcttcacgcccttgtcgaatccataatcaacagcagcgttcagtcctcgcgcgcgcaacctgtcggcgatatcgtcgaacagcacgttgccgcctgccgcatcacgcaacggaagcaccggacggtcgtcaagctgttcggcccacgtcaacatggtcttcaggaaccgaggaccggattggtgcagtcgttcttcatccaaatcttcggaaccaaaggccgacacaatatccaagctgtggtccgccaatgccagggcatccagcaacagtccgcgaccgcctgcgctttcgagcggaccgaactgctgaagcagacgtccgtgcgtggttttcgcatagcacatcgacagaatcacgtcagtggcacgacctccggccacgtcacgcaaggaaaccaaccgcacatggcgcaggaatcggcccatcgccttggatttgcctgccaacgacttcaattcggcacccaagcgtgtgcggaatgcgtcggtcaacatcacgaccacaagtcgatagctggaaggaaccacggcaaaaccggcggcacgttgcgtaatcagacgcaccacttcatcaatctccggctggctggattccaccagaccagaagacataaccggcacaccgctcgcttccacacggtggaatcgcacctcaccggcagccggctcggtggccacatcatagcgaacaggaccatatccctcggattcaaggaatgcggacaggcgcggcgcacggcgagacggggcagcatccacctcgatatgaggcaacgtgtcgatcagctgcttgacgctttcgctggttaccgtcgcgcagtgggcgatcaccaccacctgctgcacgcggccgatgatggacagcaactcgatagcgggaatgtgcgcgcacgcatcgagaatcgccacatcagccagcacacccggctcggtgagtgcggcgagcgtacccggcgcggccaccagaatcggcttggccgcggccagaatctccggatgatcacggcgaatcctgctcagcgacacactggcgcgccctgccagcacggtgtgcatctggttggcttcctgagtgcgggagaacagcatgtcgcacaggcgacgcatggattcctgcgacaccatcggtccaatggagcgcacgtgctccacatcgacctgcgcaaagcggtcggatgcggcctgcagcgcggcaccatcctggttggagatgatggcggacgaacgcacaatgtcctcaaacacggtggtccaccaggccagctgcacttcgccgcgcacctgctccacgctcactcggcgagcgttgagatcggcgaccagttcgttcagtccggcagaggcgaattcctgctccagcaggcaacgctccggcaaggtgtccagtgccttgcgatcatccagcagtgctttcaggcgtgcttccaccttctcgaaatcggcggtttccagattgccaccagcgggtgtggtggaaagcacggtatccagcgcggtcatattgctgaccagcgcctcttgggtggagatgatctcgtcgagcttgctgggcagcaccggccaaccgccgtgaggcacgaactgatgccactgctccccttgcttggcgactaccttcaacgcttcgtgcaagtcctcgacctgcgcgccgacgcgcagcagatccttggcttccttgatgtggcggcggcgctcccagaatcccatcgacgtgccctcggccttgcgctggctcttcggcttggtggcctcgatcatggagctgatgtctcgctcgaaaatctccggctggaacacgtcaagcactcgtcgcagattcttcaaaaccgtaacctgacgctcccactcgcgggtggtgggaggaaccgggaatccgcaggtctgcacggtgcgtgccacctgctcacgggtggcgggcaggaagcgacgcagcaaatcgtccacgcgctggtaggcggttactgcctgttcttcagtggtgatggacgccttgtaccatgcggtgtcttccgggccgatggtgtattcgccgagctcgccggcgcgttccatcttgccgatccatgtgtcaatatcgttggcgatgctcagggcacttgactcgtcaagtcgaacgtgggtggcagggtgcgtcgggagcacggagatacgggccagattctgaatggtctcgtatgcggacacattccacttatcgttgcccccgtgcaggtcgcccagatagcgggtcaagcgcgagcgcacgcccacgagttcgtcggccagctggtcgaatcgctgggtggcgactccgggctggaatccgactgcggcaatcagctgcttatcaagcgcggcgttggcgtgttcatcggatacatccagtacctgcgccttcatctcattggcggaagccgtctggatgaacagacgcttctgctcggccacgccgggcacgtacagcacggaacgaccattcatcaggcagcgcgatgcgatggccacagcctgctccgcggtgcccttcgggaaggtgccgtcgaccacgatgctatggccattggcagcaagtgacgcggcatatcgcaccgtattgtccacatcgccgacttcgtactcggcatgcgggtctacgtcgaaaggactgtattgcggaatattggcatctttgagcgcggtgcgggcggattcgtcgccggcaagcgcgtccaacagcacattgccggtggggccgttctccagctggtcgatgaactgtcggctttcgctgatcatctgcgacgaggggtccatgaagcatccgagcacaatctggcgctcgatggcgaagtcggagatacgctccgacgcttcggacgaaatacgggcgaacatcgcggaagtttcgggagtgccactgtcatagctggcaccgtcaaacagggaatcctcatccaggaacaccccctgctcacgcaatgtattgacgaacgcgacgttcagggccacgcgaccggtgaatcgaatggtggtcgacaagccatcatcctcgatcgtgacgctcaccgggtacaacagcaccggcagcgcgttgcccttccatgtggccacgccgaccacgagcgacaactccgccacgccggaaatcctgcgtttggcggcctggtcatccagcacgcgcccaatatggcgttcggcggccttaagcacacccgtgtcgcggaacaacgaatccaaccggacatggccggaagcgaacagctgggcgatgccggagggatgggcatgggtcatctccagcttcgcggccagttgattcacatcctcgagcggcgatggcggctgcatgctgcggtattggtcacgccagcgacggatgcgattcagaccttccgtgagattctggttctgagtctggctctgggtcatctctcgactcactttccaaccgcttcgcggtattcctgatagcccttgttgtgagacagggcttcgtcaatatcggcctcgccacgggcggcgagccaagaatacatgtcgtcgtacaggtacggattcatggcgaggaacgccagcaattcgggatgacgggcgacttcgaattgaacattgaaatcttgcgtggtttttgcctcgtcagaggtcaggccatcgacttcgactgccggctcctgtgctttcagctcgcccttggccacacgctcgaacaccgagccgggctcgaagaccggagtgtgtacgcccgtggagtcgatatcatatgcttcggataccgactgctgggcggtttcggcagccggctgctggtctgctacgcctgctgcggtggcttcttgatatgcttcggctgcggtccgctgctgatcgtccggtacgtcagctgccggctggtcggtttcagactgggcggttgccggctgagcggtctcaggctgggtgttttcagattgagcggcttcggcttcccgggcggcttcaggctgggcaacttcagcatgctgttcgacagtgtccgccggctgagaatcgccggcattcctggtattcggagcggactgaacgttttcggctgacttgcttgcgccagccgctgcatcggattcaacaaccgccgccgacgccactgccggctcgcttgtgctgggagcgtgcttaacaacggcatgggcgatggcatctactggaacaataccggagatcctgctgtgcttggatgcaggcgttacaatcgtcgactcaggttcggtctgctgcttcggcagtgccacggagttcatggcctgctggtttttgcgttcggtctcctgctcggcatgctgggccaacgcatccgcgaacagatcacggggtatggccggctcatcgtttttcgtcactggctgcgtgatattcagcgagccaagttcaagctcgtcgaccttgcgtcgaacattatccgcgctgaagatggcggtcggctcgccggcccgcaaatcaagaatatcgtcgacggacatatccgccgcatccggctcctgcggtgcttcgtgaaccgcatagccaaacaaatcaggcaccttgaggtcgagcggctttgccactggatcgtcgacacgaatgaagtccgcaggcacatcgccgaactgcatgcgcatgggagacgtcggcaacaggaactcggcattggccggcaagcgcaacaaatcgccattttcccgcaccacatacgatccattggtcgatccaagatcacggaccgaggccgtgccattgctttttaccgtgaacatggcgtgccgtttggacatcgatttggtttgatcggcgacgtcaaggcgggtgttgccatcatcggcaagggggcgtaacggcttacggccgatttccacgcactcccccggcttgacgctgatccggtcgacaccgttgatcttcaccgtccactcgctcaccgtgaccgccttcctggacacactatttgaccacactacgtgccattgtgtcatcttttaccggcttttggcggattactgggcacagaattgacaactttcgctcattgccagctttgtgtttccacgccggatcgcgttctccgcctcgtcctcgtcaactagtctactcagtatgcggaaaccccgcagcctgaaacacaggtgcggggttcctcgaaaagctgtgattgcggcttatgccgcacaaatcacttgagctcgacgctggcgccagcctcttccagctgagccttggccttctcggcatcttccttcttggccttctcgaggacggccttcggagcgccgtcgacaagagccttggcctcggccaggccgaggttggtgatggcgcggacagccttgatgacctggatcttcttgtcgccgacggcggagaggatgacgtcgaactcatccttctcttcctcagccggagcagcagcgccagcaacagcggcaacagcggcaaccggagcggcagcctcgacgtcgaacttctcctcgaaggccttcacgaactcggagagctcgaccagggtcatctcgccgaaggcttccagcagctcatcgttggtgtacttagccattatggcttcctttcaatcttggcggcggacgaagtggtagatccgctgcctaataaaccttattgtttaaattatcgaagcgactgattcatgccgtgagggcgtaaatcaggcagccttctcctgcttttcgcgcagggcgtcgatcgtgcgcacagccttggtaggcagagcgttgaacaggtacgcggccttggccatcgatgccttgatgtcgccggcgaattcggcaagcagctgcgggcgggacttgaggtctgccagcttcttggcgccctcggcatcgtagacagtgccgtcagcggcggcacccttgatgacaagagccttgttgtccttggcgaagtcacggatgaccttcgcagcctcgatgaagtcgcccttcacgaaggtgatggcggtcgggccggagagaatctcgtcgagaccctcaatgcccgcttccttggcggcgatgcgtgccagcgtgttctttgccacggtgtaggaagtatcgcggcctagcttttcacgcagatcggaaatctgcggaacggtaagcccgcggtactcggtcaggtagacggcgtcagcgttacggaattcttccgtaagctgagcgactaccgcttccttttcgggcctcttcatggcgttccttcctaagtcggccgttgacttggagttcggaactttcggccgggcaacaaaaaagccctgcgcacaggcagagcaatataatctcgcgaagcgaccttcgccggcccttgacgggcttatatctctcaacctgcgctggcttggcgaaccaaacttcggaaatgcactcgcgcgcacttcaaccaacggtctgtggtttacggatgattagattacggatggtcagcgacattgcagaattcgggcgtgtcgcggggcattacagcgtggcggcgtactgggctacggacgcggtgacttccttcagatagtcgagcgagcgacgccagtggccgggcacctcgatcgaatggttggcatccgggtattcgtgcacgtgcggggtgagcgcgttggcgcgggcttgatcgtagaacgggtcggcggtgccggcgcagatcagcggtgccgggccggagtatcgggagctggcggcgtgcgactggccggcctgttccgcgcggatgatcgcccttgcttcggccacgctcggggcctcggattcggcgacgatatcatcgccgacagccggcaccggaatcacccgggcggatggatcgaagtcggcgtgatgcagcaccggggtcagcagcacgaacggcagaccgtagtgtgaggccacatgtgggtaggtcatcgtcgtcagcgacttgccgatcagcaacaggcgagggccggacggggtgtcggaatcacggttcggcgagccagctgcgccatcggccagcacggtagcagaatcatcggcggcaacgccatccccggaatcaccggctttacccgcgccggactcgcgcgcggcggccacccagccgtcaatcgcctgattgaggaccggaatcaccgtggacaggtcgtcggaagcgttgcgtacgttcatgcggtcgattcgccagccggcctcgaccagagcctgggccgaccagtagagcagcggacggtcgcagttgtagccggtgccgggcatcagcagtacgcggccgtactcctgaccgggcttgacgacattcttcttccaagaggtgatgctgacttcgacggccggtttcatcgcgcgccttccttccacgggtgtgtcctgcgtgtcccctgagttgttccgaattattctggcagtcagtctactcccggacccgttcacgttgcctccacaagctataatcggccacggttctgattgggtgcgcagcgcctgacgcgcgttgggcaggccgatcagggcgagtcgcaattctcgccggggccagccgcagcattatgcacgcggtgcgcagccccgcataaacccaaggaagtagagagtaaatggagaagttcttccatttgaaggaaaacggcacgaccgtctcgactgagattctggccggcctgaccacgttcttcgcgatggcttacatcatcgtcgtcaacccgcagatcctgtcgcagacgggtatgccgtggggcggcgtgttcctggccaccatcatcgcggccatcatcggcaccttggtcatgggcctgttcgccaacgtgccgtacgcccaggccgccggcatgggcctcaacgcgttcttcacctacaccgtgtgcttcggcctcggcttcagctggcagcagaccatgtgcatggtgttcctgtgcggcctgatcaacatcctcatcaccgtcaccaagatccgcaagatgatcatcctggccatcccggagtccctgcaacacgccatcggcggcggcatcggcctgttcgtggcctacgtgggcatgctgaacgtcggcctgatcaagttcactcccggcgatccgaaggccgccgccaagggcggtgccgttgcggctaccccgggtctggccaactttaacgacaaggtgctgtgggtcttcctgatcggcctcgtactggccattgtgttcaccgtgatgaaggttaagggcggcatgctgctggccatcgccatcaccaccgtaatcggcatcccgttcggcgtgaccacctggtccaactcgcagtccatcagcgagaccttctcccagctgccgcagaccttcggcgcgatcttctccgccgagggcttcccggcactgttctctgatccgaccaagctgccgctggtcatcgtgaccatcttcgccttctccatgtccgatacgttcgacaccctgggcactttcatcggcaccggccgccgcaccggcatcttctccgccgaggatgagaaggctctggagaacggccacggcttctcctccaagatggacaaggccctgttcgccgactccatcgccacctccatcggcgccatctgcggcacctcgaacaccaccacctacgtcgagtcttccgccggcatcgccgcaggcggccgaaccggcctgacctccgtggttgtggcgatctgcttcgccttgtccgcgttcctggccccggtcgtctccgccgtgccgtccgccgcaaccgccggcgtgctggtgatcgtcggctgcatgatggccgcttccctgaaggaagtcaagtgggacgacatcgccgaagccattccggcgttcttcgccgccgtgttcatggccttctcctactccatctcctacggcatcgccggaggcttcatcatgtactgcatcgtgaagacctgcaagggcaaggccaaggaggttcacccgatcatctggactgtggccgcgctgttcattctggacttcgtgtgcatggcgattctgtaacgctgattgacaacggattagcctttaaggattaatccgccgccatacggcataaaggccgggctctcacaagggcccggcctttgttgttgccacagtgatcaacgcccatgagtaccttcgatgatcatccgccattcttgatgcatgggaatagttgtcaaccgacaactaaacgtacatggcggcagcacgagtgccttattcaacatcgaaatatgcagcgcgaagaagccgaaaaaccaaaaaggcttctataccgaatgaaacggtatagaagccttttggtttgcgatcaagcccttctcacccgagagaagctagagaacgatcagtcctcgaatgccgaaccgttaagcgggaagccctacgggcttcccgtaggtgaggggagcggctatgccgcgaccgatccgtgagagggatttagtcctcgaacggatcaaagtcgcgacggacgcggcgacgcgggcgctcagtacgctcttcgcggtcggcgcggtagtcgtcgtagttgtcgtcggtggcgtagcgcgggttacggtccgagccacggccacggccacgggaaccgccacggcggtcatcacgatcgccacggtcatcgcgatcggaagagcgacggcgacgcggacgatcatcgtcacgggagtcgcgagcatcacggtcatcgcgatcgtcgaagtcacggtcggcagaacgacggcgacgcggacgatcatcatcgcgatcatcgcgatcgaagtcacggtcatcggagcgacggcgacgcggacggtcgtcgtaatcatcctcgaagtcatcggagcgacggcgacgcggacggtcgtcacgatcgtcgaagtcacggtcatcgcgctcggagcgacggccacggccgccacggcgatcgtcacggtcaccacggccacggccgccacggcggtcatcgcgatcgccacggctcgggcgggcgttgttctcctgatcctcgaaaccaggaatggccagggagatcttgccgcgatcatcgacaccctgaacgatcacctcaacggtgtcgccttccttgagcacgtcttcgacagcgtcaatacgctcgccgttggccaggttgcggatctgggagatgtgcagcaggccgtcggtgccgggggtgaggttcacgaaagcgccgaacgacgtggtcttgacgaccttgccgttgtaggtttcgccggcctcgggcacgtgcgggttggcaatctggtcgatgatggccttggccttctcagcagcctcgccaccctcggaggagatgaagacggtaccgtcatcctcgatggcaatttcagcgccggtgtcttcctgaatctggttgatcatcttgcccttcgggccgatgacttcgccgatcttctcaaccgggacggaggtggtgatgatgcgcggagcgaactcgctcatctcggccgggccgtcgatgcactcgttgatgacctcgagaatcgtggcgcgggcttccttggcctgctgcagagcggcggccaggatgtcggcggggatgccgtcgagcttggtgtcgagctgcagggcggtgatgaactcggaagtaccggccaccttgaagtccatgtcgccgaaggcatcctcggcacccagaatatcggtgagggtcttgaagatgtgcttgccatcaacgtcgccggacacgaggcccatggcgatgccggcaaccggagccttcagcggcacgccggcagccaaaaggctcagcgtggaggcgcacacggaacccatcgaagtggaaccgttggaaccgatggcctcggagacctgtcggatggcgtaggggaactcttcgcggctcggcagcaccggcacgagagccttctcggcgagggcgccgtggccgatttcgcggcgcttcggggaaccgacgcggccggtctcaccagtggagtacggcggcatctcgtagttgtgcatgtaacgcttggactgcggaccggacagcgcgtcgatctgctgctccatcttgagcatgttcagcgtggtgacgcccagaatctgggtctcgccacgctggaacagggcggaaccgtgcacgcgaggcacaatgtccacctcggcggacagggtgcggatgtcgcgcaggccacggccgtcgatgcggtagtcctcggtcaggatgcggcgacgcacaatctggcgctgcagttccttgaaggcgttaccgagttccttgtccttctcggcatcgtccatatcggtgaactcgtccgcgagcacctcgcgcacgtgctccttgatctcgtggatgcgatcctgacgcggcagcttctcggcgatggagagcgcctcgtccagatccttgtgagcgatctcgtcgatacgggcatacagctcgtcggtgtactccgggaagagctggaattccttggtctccttggcggcgatcttcttgagctcatcctgagcctcgcagatcaccttgatgaacggcttggcggcttcaagaccaccggccacgacctcctcatcgggcttggtctgaccctcgtcatagatgaggtgccaggcgttcttgccggcacccgcctcgatcatggcgatggcaacatcaccgttctcgatcacgcggccagcgaccacaatctcgaacacggcgcgctcacgctcactccaacgcgggaaggcgacccactggccgtcgatcagcgccagacgcacaccggagaccgggccttcgaacggcaggccggagatcatagtggaggcggaagcggcgttcagggcgatgacatcgtaagcgtcatcagggttcacggcgagcacggtctcgacgacctgcacttcgttgcgcagggtgtgcgggaacagcgggcgcagcgggcggtcgatgatgcggcaggcgaggatggcctcggagctcgggcggccttcacggcggaagaacgagcccggaatcttgccggcagcgtacatcttctcttcaacatcaacggtcagcgggaagaagtcgtagttctccttcgggctggaaccggcggtggtggtggacagaatcatggaatcgtcgtcgaggtaggcggccacagcgccatcggcctgctgggcgaggcggccggtctcgaagcgcagcgtgcgcttgccaaacgatccattgtcgattacggcctcaacggccttgatttcgggaccctccatagggttcctccttctttaattttctaattattcctacatactgtgctgcggttcggcgactcgcttgaaccgcaactgtcctcttcagcggacgtcacataccttgtttcgactgaccccttggccgtcgttcctcgtgtcaaccccttcattcgggttctcctgtcggccttacctgctggcctatcctctaaccctcttgccgttgttgccgttggctggcgatatgtaaaacgcccgagcaccatcctaggtactcgggcggaagtcttcaattatcgacgcagacccagacgctcgatgagggaacggtaacggttgatgtcaacgcgcttgaggtagtcaagcaggcgacgacggtcaccgatcatcagctgcataccacgacgggagtggtggtcgtgcttgtgctccttgaggtgctcggtcagatcagcgatacgcttgctcagcagagcaacctggacctccggagagccggtgtcaccttcatgggtcgcgtacttagcgatgatttcctgcttttcttcagccgtcagtgccacggcatcctccttatattgctgcgcggtgctaccggcccgatgccggcgcgctctctatccgcgggcgaaatacgccaagggtcaattatacaggagcaccagacaccacgaatcagaccaacgtcagcaggccgccaaacatcacaacaagcaaagcaatcgtctcaatcacaaaaaaaagataaacgacgcccaactgcgcgtcagcacattcaacggcgactcttttttaatcgtcaccaacaatcccacccacagcaccgcgaaaacggcaacgccaataccaactgaaataatgccaagattcgccgcattcgccaatgccgacgactctccgtacaccacatatgtcgcataccaaaaatcaattttcagaatgcgcaggccggcaatgagttgctccgccgccaagccaatcacaaaaaccgcgccccacaagcgccgatgggcgtcaacaaccagcagaccaaggccggaaacggcaatcagcgtcaccgtccaggcaacaaacgcggcgccgcgcggctcaagcgcgctcaaattatcaagcagccactgcgtatcgttcaccgcaatcgcacgcccccaccaatacggcaccacaatggccgcaatcaccagcagcgcataagccagccacaatgcaggatgcgagcgcttacgctcaatatcggccagcgacagcgtcgattcgggaatggacgccaccggatgcttggaaacatcgttatgtttggaaacatcgttgggcatgggcgaaacaccatcggaccgcgtatcgatttcagcctgcacctcaccgctcgcctgctggtcgaccggctgtttctccacgctggaattcaccgccatctacgtttacctcgcgttcgttgttcgacgccacacctgtctgcacaatgcgtcgtctcatgccgcgacgcccatgctaggacggtattgtatcgtgagtgcgccatacgataatgacatggcgccggacataacgccgcaatacctgattttcgctaatcgcaaccatgcttcggcggacgacataagccatacatatgttcataagggcgaaccatatccgaattactcactccgctaacatcaccacataacggcaacatagatacacagccatacttgatatcaggagaacgccgtcgattcgaaatgaaaactgccagccgcccacacaccagctcctttgtttccaaaatcgcacattctacgccgatgtcatgctccaccatgtctcacgccgcggtctcaacataacaggatgggttgtacgaatccacgttgccgagcattcgcacaacccaccattgcgacacatcactgattccgcacattcaatcgctgcaaccaacaggctgcggcgatatttcagcgcgaagagcggcgtatccgaatgacactgatgccagccagcatcagggcaattgcagacagcaccatcggtgttacggacgaaccagttgatgacagttcagatgaattatcatcagcagtagaagactgttgctggccgccatcaccggtctgatcgccgttacccgactggttaccgtcactggtctgatcaccatcaccggtctgatcaccaccaccaggatttccgccatcaccagactgacggtcaaccgccaattgcgcgagctgcaaactcagtgcacgctgcggggcatccacctcattttgcgtggaaggatcggatgccaacgcctgctttgccttatcaagtagcgtgagcatcttatcccactcatccataggatattccgcagactgcagagagtcagcctgatcaatggccgaacgcagcttagacgtatccacagctttgccgtcagaagtcaacacgtcgctcaagtcatagtaatcaaaatcgacataaccacccgtattctccttggcgtaattgaacaagccgattcgataccccttaaagtgcgacaagctccaatcgtaagtcagcggcccctgctcgtcgccaagcttggaccattgcttaccgtccagactgtaccaatactgaatcgtcaacttaccactcgcattatccagtgtgttgtccgacttgatccacacattggtcgcatcatctggcaatgtcactgtgccgcccgatacaaaggcctcttcagcgtcacgatcaatcgtatcgtcaacgatattaccgtccgcgtccttcacgccattgtcgtagacacgcttgaccacacccaacgttcgctgtccattttcttgacgcacagcggcataggcaaaactacgggtatatgtagcgaggcctgcggtgtctccatccttcatatgactgacatccatgtgggtttccacagacatggatccgccaaaggtacgctgcgacaaaacgttacgggcggtttcaaaatatgtcaggtcgccataagtgcctttcatatatttggccgtggcggaaaccttgtgcccattggtcaaacgcaaccagccttcacgatcagtgagagaccaatatcggttatctggattatgtccccattcccataccaaatcaagattcgaaccattgggttggtattcttcggcgaccggatattccttctcatcagcaagaccgatcagggaaatatcgtcgatgacgtaatccatgcacgtgccttccgcaccccacgcggtttcgacaatgagtttggaaccttccacattagcgtcggatgggatggagaactcacctgtgatagtagtcgtctccccacgtttcactgttcctgtggccacacgattaattgtgccgtctgcatattgaatcgccacataaaacaggtgggaagtcacagccgatgaatcgacgccgtccatctcatggtcgtatcgaatcgttgcactggcacgatatgtcacgccctgctgcaattttccatccatagattgacccgggccagcgccattgtattcgccacgattcgtcacagcaagactcgtggttccagaaagagaaccatccgtaatcgcggtaagcgtaccattccactgaggggtccacgattcagtcccgttttcgaaatcgccattgtccaccagctcgattccaatcagagaatcgtcaacctgaggaggctcctccagagtccaccaatcctgatcctgataagactgatgaggcgcgtcattatcaaaatcgtccgaattgaccagggaacgctggcgaaccagattctccaaatcagcaggcaaatcaatcagtttgtcgtaggtgtccgacgcgcttacctgattattgtccccaaacacaggccatccgtcatcaccccacgttgcaggaatcaaaccgggaatacgtccggtcggatatgtgtctcggaagaagaatccatgccaagacgtcgtgccatcaccgttgtcgacttcaacaaggctaccttgtgcgaaagcacctagataatactttttggcttcgtatttggagccatcaagcaaatcagtggtgcgcagcagcatcaccgtacgaccgtctttgccccagtaaatcgttggagtatagaaataatcaccgattttgaaagtctgagatccttcaaatccggtaggagtctcaccaagatcatcagtgaactgttcggcagagatgatattctcatggctctccaccaccgtggttaaatcatcggacagcctatattggttgacgccggagataatccaaggactcccttgctcatcaaaatacaatgacggatcatggaatccccgattaagggcaatcttcgtccaaggaccattctcaatatcatcggtgtagtagatataagcgccattaaggttgttcgtattgaataacacgtagaagcggccattgtgatagcgcagcgacggagcccactcgccttcgccatacgagctagctccattgcgcaaggatgaagcatcgctcatagaaatgcgatcatacacgtacgtgactatccaccaattgaccagatcataggatttcataattggagatccgggactgagctccatagtggtactcaccatgtaatacacatcacgaccgtctttgttattcggatcgtccttcgacacacgaataacactgatatccggaacatccgtgttcaacatgggaatggaatacgtgccatcaccgctatcagtcgtggtgtaactgccatccgatggcgttgaagatggcgttgaatcatccgcaaagaccggcattggcgccaaaatcaacccacaagtcgacaacaccgcgatagcactagccgaaattttttgtcgtaaataattcataagtcttttaacctttcatgataagcactcaacatcgagtgcgtattccaatagcatgcccgcacaaatcagcaatgaatgacgataagacattcccgcatatggataagtgatggacattaccactgccaaaacttacgcttgaacaagtaccagttctaggtttcatgtgcggtcatcccgaggctgccgctacgggatgaccgcattaccaagaggtaactagcgcatctcgcgacgcactcgcgctacgatcacaccagtgagagccaagcaagcgacaatcacagcaccaggcaagacagaggaaccggtttgtgccaaatccacgccatcgtcattggagccgtcggcatcgccatcagtggaatcatcagccagcttcagaccggcacgtgcactattcaatgcagcaagcgcatcttgaacctgctgttcagtagcggattcatcctgcaataccgcctgagccttctgcaatgcgtcagcaaacaccttccagctctcttccgtgtaatcggaagcgttcaggccggaattctcattcactgcgctctgcaaatcagacttgtccaccggagtcgaaggagtttcatcctgcgactccgtgaaagtgtacgtagtgatgtcgtacagctcatcctgagcattcgcaccaccatcggatttgaaggagaacaccacatgatgcacccctgtcacaccctcaagggtggtcgtgtaatcggcgtactcggatccatcaccggcaggaatcgaaatagaagccacaggttcggaatccggatcatcaagacgaatctcaaggatgcctccggctttgccagctgcagtcacagtcagcgaagaggcgccgttattcccgaaatcgacattcgccaaagacgtccactcaccattattaatattgctgagcttctgaccttcggaattgtctgtagtcatatcgaccacgcgcacaccagaagtcaggtcatatgcgttctgaatgccggaatcccatgcaatggtggaagctggaatgcctccatcttgatacgcgtccagattcttcaccgaagagagaccctcatatgtcattgcaatatcggcaatggaaccatcctcgttaaccgtaatcggatcgagatgagtatttcggtagccatgcgccgcgtcaagattaccgccgttcatcaattcctttgccaccgtttgcgcatggtaggtcatataccactggtcgccaagttgaaccatcgcgtgatgattgttgccgccaacaccgaaatacgtgctcggattcttcagaatctcaccctgataagtgaacggccccatcgggttgtctgaagtcatatacgcgatattgccgtaaccgaccgtgttaccatcaattacgttgtcatggctgaaattagtgcaatacgagtagtaataagtaccacctatcttggcaatcccggagtcctcaaacatggcaggtgcgtctatggcctgagcctcaccttcggtatgcagcatgtcatcggacagtttaataacgcgagccgtgttcggatgttcttcctcgcctgtcggaacaccacctccgtaatacaggtagccctgcccgtcatcatccacgaacaccgcgggatcaaacagccagaccacaccagcggattcaggagtaccgcccttaatcaacagctcaccggtttcgtccttccacggaccaacaggagaatccgaggtcagcacaccgataccgctgccgccattggcgaaatacaggaagaacttctctttaccgttgatggtcttatgagcgacggcaggagcccaggaattgctggcccaggtggccaccccctgttctccagccacacgaatgtaaccctcattacgccaattgaccatgtcatcactggacagaacattgatggtctttacttgagcgaacgaattgtccttgatctgcccagtactgtcatattcatagtcataattcaacgagccatcagcattcacagaagtgccatcacccgtagtgtagatatatacgcgtccgttgtattccatagcccacggatcggcgccataccaataatcgataatcgggtttgaatagtcgccgaaagccttggctgccgttgccgtacccgtagtcggcggcacgaatgaggaaccagaatccgaaccggttacggaaatgtcgtcgacaatgaagtcggcattgcttgtgccatacttgttttcaatcaccagcgagggactggtgaaatcaccactaccacctaacgttccagtacctgaaatttgtgtccactcacccgctttcgccgttccggtcgcaatctggtcacatccggaaccattacccgaacaaacagtgatattgaattcaccgtcttccgtggccttgacccacatacttccggtatatgtctgtcctttttccaccttgccatcaagagactggattgcaccagcatcagaggatgtacgatcagtaacgctcaaggcgccactgccaccatgcacatcatccgcagtgacggcaatggacgatgcggagctattccacaccgttccagacttccaaccattaagatcgtcttcgaatccgccgttgacgaccaattcgacgggttcatcggccgacgccgcagtcactccgatagtcgctggaaatacagcccccatgcaacacagcacggatgcagccgcagcagcaaccacacgaccggttttccttgtttgcaatatgtgaatgttataaaccattcagttccctttcctgaatgatggagggcgactccccccccccccccccccatcattttttcttcgccgcacaatcgaatcccacgttggttacgaccacatcgcggctcattgcaaagccatgccagaggaacgtccctcaagcgcagccatgcaacagccattgtataaatgagcgcatttcactcgcgatcgtccttgataacaaattgataacgatatgcacaatgaaaataagttcacataaacgcaacgcaacacatcaaatatgacagtttcatatgccaattacacactttgcataacatatttcaacaaagaatggagacgtacaagcgaactcatctgatgccaccactcatcgcctataaagctggcgtgtcgcgccacaataacatcacagccgataaaacgacaccccgaagttgagactcattcaacaatgcggccagcttagacacacaaccaacgcttcgcttcatagcaccgaacattgattccagcacagtcacgaccatcttctttgaaggcaatcgtgtttacgccccgggttctaaatagaagtgcaacaccttgtctagggttggaagtgttcgaagtttctaacttaagaaggtgttgcactcatgggtcaacagtattcgcacctgtcgtccgaggagaggatcctgatcgagaagctgcattgcgaacagcatctgagcgtccggaagatcgcggaggaaatcggtcgggacaagtccacggtgtcacgcgagctgaggcgcggcctgtggttcgcgtccaacgagaacgggtcgtaccgtccctaccggccgaaacggctgaagaccgggccgtggacctcgggtccgttctattcggcgctggccgcgcagaggaaggcggacctgcgccggcgcggatcccgcaagccgcgtcgcatggactcggaccggcttcgcgcctgggtgctggactcgctgcgcagggggtggagcccggaactgatcgagggacggttgaaggcccagtgcgccggcgacccgtcgatgcggatcagccacgagtgcctctgccagtggatctacgccaagccgcagcgggcgctggacctgcgccagtacctggcgcgcggcaggaaacgccggacgaggaaaaagggcaggaaggcgaaagggccgcgcatcccgatgcgcgtgcccatcgcggaccggcccgaggcggtcggatccaggaaggggttcggccatttcgagtcggacacggtggtcggcgccgcgccgtcgaggcgctgcatgaacacgcaggtggagcgcaggagccgcaggctgttcgcccggctcgtcgacgacaagagcgcgtccgccacggccagggccgaatacgagatcttcaaggacatcccgccggccgcgcgcgtcgaccgcacgtgggacaacggcacggaggcgagcctgcacatgctggtggacgaggcgctgggcatgctcacgtacttcgccgacccgtacagttcctggcagcgtggcagcaacgagaacaggaacggcaggatccgccgctatctgcccaaaggaaccgggttcgaggacttggcccaggaggacctcgacgcgatcgtcggggagatcaacgacacccccatgaagctcctcggctacaaaacgcccaacgaggtatgggacgaggagatcgccaagctacaatcgaaggcagccagcccgaacacaagcgttgcgcttacaaattgaatccggggggcctcatgagccgagggtgtaagggataaggtgtaaagggtaagggtttaaaggcgtaagggtgtaaggggacactcactcctgccggtacagccgcgaatacaatccgccggcctgcagcagttcgtcatgcgtaccggattcgacgatctgcccatgatccatgacatggatgcggtcgaaatcccgaatcgatgcgagtctgtgcgccacgacgatgcacgcattgtcggagtcgagcaacgccgtcatgacatgtcgctcggtatcgttgtccagagcactggtgggttcgtccataagtaggaagtccggtcttccgacgaccggatccatcatcccctcgttgatgccggcaacctcgcacgccctgacgatgtcgtcatccgtcagccacggacggtgcagcgtgatattgtcgcgcaaggtttcgttgaacaccgtggattcctgatgcacatacgccagcctgtcggccttccatcggctgtccgcgtcgtaaatccggcatccgccgtcgttgatggtcaccgtgccacagacgggttcgatgagtccggcgagcagtttcagcagcgtgcttttgcccgagccagtggggccgacgatggcgatcttgtcgccttcaccggcgggaatcatctcgcaaatcttgcgcatataggtggcgaacgccatgatctggctgatgacgccgacgatgccggagaaggtttcgatgaaggcgcgttgcacgtcagcctgcgcgacggtcgcacgctcgaccagcgtcctgttgcgcagggaataaatgacggatacgacgagcaccgccgcgcacaccgtcagggtcagcatcgtcaatggcgctgaataggcgatcatcatgatcaggtagaccacgaggaacaccatcgacacgaccgtcgacggcagactgccggtcacgatctgttcgacgaccatgaccaggttcgcgcggtagatcaggtcaccactggaacggttcacgaagaacgggaactcccgatcgagcacgccggtcatgtatcggcgggacaggtatcgtccgaatcgcacctgcacgcgggtgagcatcatggtgttcaacgcgccgaccgccatcgccgtgaacgccgggcgcgctgccttccacgcggccacgggaggcgtcgcaggcgtggcggcgggaggacgtcgcgtttcccgattcccggacgggttcccatctccgagcgtccgccggaggccggcgaccgcagcggtttcggccattgggaggccgacggcgtgatcggcgccggatgcgacctgcacactgaggtcgagaggaagaccaggttcctcatggccgggatcgtgcccggcaggaccgccggggaaagcgtcggggtgcggctggcgatgttctcgccgctgccggccggcgcgcgcgtcagcgtcacgcacgacaacggcgccgggttcgcccgccacacgcgcctgcgcgacgggctgggcatggacacgtacttcgccgacccgtactccagccggcggcggggaagcaacgagaaccggaacggcatgatccgccggtatctgcccaaacgcagcgagatccagatgggcatggccggggaactgcgggagattgtcgacgaggccgacaaccgtcccatgcgcgtgctggactaccggacgcccgccgaggcattcgccgacgaactgctagaattgcaggaccaacagggggtgttgcacctctaaatagacatcgggcacacggtttgcgcggcggtgagcagtgagcggtgagtactgagcgacgtacggcaactcacgtgcgctcacacagtggtgagcaatccgccgaacaacaccacgagcagggcgatggtttcaatcacgaagtacagaatgaaactcgcccagcttttggtcagtacgttcagcggcgaggtcttccggataatcaccagcagaccaacaaacaccagggcgtatacggcgatgccgatcgccgcccccataatgcccagattcgcggcatttgccagaccggcctgcttgccgtagaccacgtacgtggaataccagaagttgagattgagcatgctgagtcccgcgatgaactgctcacaggccagcccgagcacgaacacgatcagccatggccaggacggcgagacgaccaccgccatcgccaatccgacgtacgtgatcaccacggccacccaaccgaccagtgcgataccttgcggagacactcccccgagcacggccacaatggagtcagtattattcaccgccagcgagcgaccgaaccagtatggcgcgatgatggcgcacagtacggcaagaataatcaacgcccaacgcaacggatgggagcgacggcgctcgatatcagccaaagacaaatcggtctcgggtatggaagcctcggggtgcctggaaacctcgacggtctctactttgccgcctacgatttccgtcgcctcgttaggttcttgctcgttggattcctgctccatgcaccgcctcgccgattacctgcttattgccatgtattgccatgccgattattgcgatgcctatcttagcgtgcgtgttgggcaagtacctgatgttccctgtggtttcgcgcactgattggatacagacaggctactgctgttgcccgtctgtatccggcgacttgtccgccgctgtatccgtctgttcctcaggcaacgtattggtagcctgttccttacgccgcctgccgtgcagcagggcctcgagcatgtcgacctgacgctccagttcgtcgatacgacgtacctgctgcgaaatcagcaagtcgcgtaggtcattgttctgctctttgcgggagacggggaagatgatggcgcgacgttcgggcgatacgtggaaatcggattcgctgccggtaccagccggaagtgacgattccgccgagtcgcgccaagctctcgctgctcgcgcactctccggaatgtttggtgcgcccgcggctcccgagcggaaaagctccgaatctgaagcccccccccccagcttattttccacgccggctttggcattgccggagttcaggatttcgtcttgcgattcacgccagcgggcaaggcaacgttcgatgcgcttgtacccgattagagccggatccaatccggcttcacggaacatgcgcacgggtgaggcaccttcgttgtagtggactacacagtaacgcttgaaatcatcggtataggtgatgcgcttcgccgtggcttccgccactgccgacaacgacttcagatacttgatctcctcggggctaaaagtccctccaccactggtcatcctcatcccttacactcgttggaaggctcattgcacaccccccttgattatggggtgaatgccatagttcgggatagtaatacttataattcggacatgcctaacccctagtagggtcgtttttatccccgtttaagtggagcctgagtagtggctggacggcaactgaacgataatcggcccacgaatggggtatacaggcccatccttcacctcccctacgattgtgttcgcttggcgattgttaccgagcctgcgtgaaacgtttgttgtggtgaaacacaagttattttcgatgcccggccccattacattcaaatcaaaatgccatacattgcccataagattcggagatggtccacaagtcatccgtctgagatgccgccaatatgacaaatggccgatctgaataatcagatcggccattgttatagctgctcagttataagcagcagtcaagctcacgcgttgagagcgcgcttggtggaacgggacttgacgaacacggtcaccgcggcgcccgcgatcagcagaccgatcacggagaacagcatggttccggcggcaccggtgagcggcagctgggtgatgttcttgacgttggtgacctggaaggtgcccttgttgtccttggacaggttccaggcatccttaccagcgaaggtggcagcagcatctgcggttgcaccggtagtgatcgtgaacttgccaacgaaggtgccgttgtagccagtcgggaccttcgtctcaatcacggtgtaggtggtgttgagcttaagaccgttcagagtgtacttaccctcagcgttggattgcagtgtgtccgtggcgccttcagggtaagtgccatcagcattggcggtcggcagagaatacgcaccgttagagccattgaacttaagcggagtcttcgctttgagctcgtcagcggacagaccgctaacatcgccttcgtacacttggaactcagcaccagtcagagcagcagcgttcttgtcgactttctgccaagtcacggcaccagccttggtggtttcttccttgctgctcttcaggtcaacaacgccggcagcggcgagaacgccagtggcgttgttcacggacggcgcggcgcccgtgatagcagtgccagcgagaatcggagcattgccattccacacgagcttgtgagtgtcattatcttcgacgaccagctttccactctggtcgacaatcaagtacagaccaccctcagcgaaggtgaaggtctgggtcttgccaccgttagaagccatcggggtaatgcccgtgacagccaaatccttaagcgcgttcacaaaagcggtggtctgcgcggcggtcagggtagtgttgcccagccaggcccactcgttcagggaatcacccttggtctggtcgttgtaaccagcagcagcgaaggcatcatccactgcctcaccggagaccaaaccctccagctcaacgccagtgttgccatcagacacatacttggcgagctcaacgtacttgaacatgcgcaggttagcctgcaggtcagcggtgtcaaccggcttggtgtagaactggtttgcatccgtggcgttgactgtgatagtcgtgctggagatgttggcctcagccgcgttggcggtggtggcgccgaacgccatgccaccaagcagggtggccgcagcagcgacacccgcgaaaagcttcctcaacttcatgagaaaccctctcttccttattgtgattgattttcttgcaatcgcggaggctgcaaccccacagcaaggcctccgcaatccgcaaatccttattgttttttcggggagggaagccttcatcgactcccctcagtccgccttcggcggccagctcccctcagcgagggaagccaaaaccacctcaagtttcttgaaatcagaccagctgacgcttacgccagaccgtgtagcccgcagcagccagcagggccagcaggcccaggccaccgccgaacaccatccagtcacgaccagtcgtgccaccggtcagcggcagactggagatagccacatacttgttcgtgaactgtgccgactccgtattcgttcggtcggaatcgttctcgccgtactcgtaagagacaacggcatccgtcctggagaccgtgaccttgacggtcaccttatcgttgtcatgcttccaaccggcagcaggcttttcggtgtcctccgaagcctcgaacgtgtagaccaaattgtcagcaccggtcggaaccctgaacttcaggtccccattgccgaagccaaccgtcgcgctcgcgccgctagcagtcaattcgtccttggacacagtcgtagtcagtccattgttggccaagccggtaacgtcagcgcacttaccagcattcgcatccgtgctatccacacacttcaggttgaagccgaagtccgaattagcagcatgtccctgcacaaccttcgtcaccttgacatccgaagcgggcaaggtcacgtaagaaggcgtgttggttaccgtgaaggcaccggattgtgcggtcaaaccttgtagcttgaggtcagtcttatcaaccttggagtcatagccttcaaccttgacctcggaaaccgagtatgtgtgcccctcagggccggcaggcaccgtgaactcgtgagtccagttgccggcggcattcagagttgctgaaccgttggcataatcctcgccgtcctgcttgagctggacctgcacggaatcattcgcgtgattctcgttgtcgtcggaccaagtcttcgtcaccgtaatcttggagaccggaagggtgatggtcggcttctgcgggtaggcggcggtctgcggatcgctcgtcgtcgtgccgccctgcgaggaggtcaccacggtcttgtagtcgacagtggcgctggagttgtcgttcgtgtagaagttgttgtcgccggaggcattggcatcgtccttgtggttcttaacagcctcgtcgaacgcagcctgcgtcggcttgacattgaagctcaccgtgtaggtgacgccgtcctcaagcgtgtcgtcgttggacgtgaccggccaagacacggtgccatcagccgcaaccgtcgcctccggggcgtcagcccacgccgtggtctggcctttccgggtcttcgtgtacgtgaagcccgcgggctctccattctcggaggcgctgtcggagctcacgacccagctggacagcctgtcgtgaatcgtcacgtcggcatactcagccgtcttggtgatctcctgataaatggactcgaagatgttgttcagctggccggcatccgtggcggccttgtagtagctgctggtctcggcgcggtcaccgaggttggcgttccaagactttccccacaaatgctcactgctcgttgcagtggcatccgggtagttgctggagatgccgtgcatgtacttgttcaggttgctcgaggtgtcgccggggttggcaccgctgacgacgccgatcgagtagatggtcgtcccggcgtccttcaggctcttcgccttgttcaccgcggtggcggcgacggtggggtcaaacccgctgccgtggttcggctcgccgtcggtgaagaagatgacgaccttcttcgcgttggcgcgaggctgatacgttagcgccgcctgggcgcggttgaaggcgtagtcggcggaggtcgcgccggacgcgctcaggccgttaaccgtgctcgtcagtccggagacgtcgtacgtcaggttgctgacgatctgcgtgtagttgtaggaggaccagccttcgcggtaaaagtcattgccgacgctggtcttctcggtgccggcgaacttcaccagggcgatgcggttccgctggctctggtcggtaatcttcgcgttctctgcagccgtcgcattgatgaatttattgaccgcggtcttgagcgagtcaatcttcgtaggctggttccaaccgctagcgatcttttcggccatcgaaccggacacatccaacaccagcacgatgtcgagtggctggttcgtcacgatctcgcccgtacccgcgctcttcgcaccggtgacgttcaacgccaccgtgtacgtgccgtcttcattggcggtaacggtcttctcgcgggccggagcagacaacgtcggatcatccggcacgccgtttgttccctcggtggaaagaggagcaggcgcgctggcggccgccttctcatcggtggtctgcgattatgtcgtggaggcattcccatcgtccgccatggcggtcgcgctcacgccggcgacgccgccaagcatcgctacggcggccacgacggccactagccgtttgccactcctgcccgctgcggtccctaccgctgcgaaccattctgcaattctcttcataaccttgcctgtctcttacgatcacgtacgccaaaacccggcgttacgcttataaggcgttacggtattaagcaaaaagcacgaatgcgtacacccgggtagagggaaatttttacccgacattgaaaagaaccttggaatttttgaaaagtggcaccctcgtcatccaccctgcgataacgcacttttcttctcgacggggcgtgccggtcccaccatctgggaactgaggcggatttgccgccgctgcgcgggggccggagttactgacgaccgtcagtatgccactgctccgcatgtgtgcagtatcacataccgctacgcatacacggagacatactacatgcaatttctgtgaacgcaaacatacgactcaccaaggccgtgttctgttgcgggcggtggtgttacgggcaatgttgtgggtagtaccctagccacaaacctatatagtggagcggatgacgggaatcgaacccgcgtaatcagtttggaagactgaggctctaccattgagctacatccgcgttaagcgtcgcttttggcgacttgagttattatacatatttcttcggggatggcaaacgcgtgtggctgcagcaggaccagccaatctagttgatggattgcggctttgccgaggactcccctcagtcacctacggcgacagctcccctcaaagaggggagctagaaaccgtcgaaatcacaaatggatgagctgggactcgtatggttggaggtcggcgcccatcgcattcagaatcacgaaccagcagttttcgggcagcgagtcgagcttgtcgatctggttcttgagcaggcgcacgtcgcggctggtgagcgcgccccacaggttaaccatgatggagacgttgtacagcatgtagcactcgggggcctcgggcgctattccacagaaatcgtcaccaccgcggaggcaatcgaaccatcgtggctcagggaaatatggatatgcggcatcgaccccgcaccgatagtcgagcgctgcgccgaacgcgcattccgccgctcctgcatcactgcataaggcccgttatcggaagcagaggaataagcagaggaatagcgagcgccggcagccgaattcgcgtaatcagtttggaagactgacgccgcccccttacccagagacacatgcggcacaccacgggaatcgtccaagatctcgatttcaggccacgggaaattatcaagcgtgaacggatagggggcatcgccaagataatcgcaccaggctttgaggaacgcctccttgcccgcccatttggcggccagatggacggcctccccgtcattcttctggcgcgcgcggtcggatgcctgccgcacctcacgcacggagaacagcgcacgcatgcgagaccccggctccgccaactgttcggcgaatgcggccacatccaccacgtcatgccccaaaccacaagtattcatgcttcctattgtgtaccgcttcgcgcgtaatctctacacctcatcagaattggggcctgatttccatttcagggggaaaagattcactatgctggatgacctcgcgcaataccgcaaacatcttgggctggctgcctagccgtccaaaaaaacatccgcgccccgccccgaaggtctatctccgtttcgaggggcggattttgaccgttccggaggtctacttccgtttcaaggggctggtcatcctccataccacgagtatccgcagcataacgccaacgccattccgccgtttttacgccttgtctacttgggtaacagccccttgaaacggaagtagacctccggcgaatgccaaatcagccccttgaaacgcagaaagcccactccgagggaggggctttcgtatgttctgcatatttctctcactgagtttgtgccagcgagaaagctccaggggaaactcccctcacccgcttcgcgggagctcccctcaaagaggggagccgagatccggtgcgctactggctcccatcaaccgaggggagccagaggaatcaggcctcgtagtagccgtcggcaccgaggcgggcgtccgggttgaggagcatcgccttttcgacctcgtggtggtcgtagccacggtgatcctcgcggaagcgacggttgtcgatcggctcgtagagcgcggcgcgacccatcatgccttcctcaaggtgacgctggccggcggccaggcgggcgttggcacgctcacgccaagcttccagtgcggcctcaccatcggccttggccacggccgcctcgaaggcacccggatggaccagagccacgaagccggaaacatgtccgaagccgagcgaggtggccagaccggccttgaccgggcgaccagcggtctcgcgaccgaactcgtcctcaccaccgccgatgcgcaggggcttcctaacccagaccatgtggtcgtcgcgctggagcttcggatccacgcagtcgagcgccgcgttcgccggaatcacgccggacttgaacagctgcgtcagaccgttgacctggaagatgcaggcaccacccttggcgtggccggtaagcgtcttctgcgagatcacgaacagcgggttgccgtcggtgcggccgatggcgtgggccagcgtgttgtgcagctcggattcgttcgggtcgttggcgttggtggacgtgtcgtgcttggagaccacggcgatgtcgtcggctgagacgccgagcttagccaggtcgtgcacgagcttggagtccttgccgccgaggccggcagccagggcaccgaggcccggagccgggatcgaggtgtgagcaccatccgcgtaggagtggatgaagccgaccacggccgcaaccggcaggccgagcttttcggcgatgtcaccgcgggtcacgaggatcgtgccgccgccctgggattccaggaagccgccacggcgacgatcgttcgcgcggctgaagaagcgcgcgtcgatgcccttgccgtacatttcctccgagttggcggtggcgttcatgttgccgaagccgatcacggattccacgccgatgtcgtcgatcgcaccggtgaccacgaagtcggccttgccgagggcgatcttgtcgacgccctcttcaagggagacggccgcggtggcgcaggcggagaccggctgaatcatgttgccgtagccgccgatgtaggactgcatcacgtgagccgcgaccacgttcggcagggcttcctgcaggatgtcggtcgggatctcgtggttgaggaagcggtcgaggtacagcttgcgcatcgacatcatgccgccgaagccggtgccctgggtcgaagccaccagcgaggggtggatggactcgaggatttcggccggggtgaagccggcgcccaggtaggcgtccacagtggtgacgatgttccacagggcgatcttgtcgacgtcgccgaccatcgaggcgggaatgccccatcgggtcgggtcgaagcccttcgggaactggccgccgactgtgcgggtcatggtggcgcggcgcggcacgcggatcatcgagccggcgtggcgggtcacgttccattcgccggattcctcatccggggcgatggtggtgtgagcctcgtccaacttgacgtattcggtggcgacttcgcgggtgggcacagagaaggtgacgtcgtggtcgaggaagacctcggcttcctcttcgtcagcaccatccttgtagtcgttgcccatgccttcctcgaacgggcggatgccggagcgggccacgacctcgtcgtggtagcgctcggcgatgtcctcttcgggcacgaggttgccgtcggtgtcgtaccagccgggcttcgggctgtcggcccaagtcagcagacccatgttccacgcaagttcgagcactgctccggcgctcaggtcgacggtgccgtccgagtggatgccgagctcggcctgggcgcgcgtacgaccggagccccacgggcccagctcaccgacggaaacgatgacgatttcgtcttccggcttggcagtgacgttggcccaatcgttcaagtcgaccggagcctgcttggtgacgatcggtgtgggcagcgccttgatttgctgcccacgcgaggagtcggacagtccagtggactttccggcgacggagccatccgtttcctgagacgaggccgcagcagcttccttctcggcgtcggccatggcctccgcacgcagggccttgatgtcgatgggctcggagccgaggccaccggtcaggtccacatcgagcggggccttgagggcctgctcgcgcgattcggcagtgcacaggtcgagcagcttggccgcaatctgtgcggtggagtaggtgcggatgccgtgacgctcaacgacggcgaccagcgggtcgttaccgcccatcaggccggtgccacgcacccagccgatcttcgggtgagcgaaggtgacgcggctcgaccacaccttttcagcgcgggcacggttgacgatggcgtcaaaggcgctcttgacttcgccgtaggcaccgtcgccgccgaatacgccgcggttcggggaaccgggcagcaccacgtggagcttgtgctgcacgttggtgtcggcaccgatgtggctgaagccggcgatggcgcgttccacgccccacagcatcagtcgggcctgcgattcgaacaggtcgccggagtcggcgagcgtgccatggaccggcggagcggcgaacgggaagaacagggtcggctcccacgcgggcttcagaatcgtggtggtagcaccggaggtcttcttctgctcgtggcccacccagtcgaccagtgcgtcgacgtcgcggtagctggagaggttggccggaaccagccacagcttggcgttgccggtagcgtgctcgcggtaggcctgcttagcccaagccttaatggacggcttgaagctgtgcgaggtggccaccacagtggcaccgcctgcgagcaggccttcgaccacctgagcggcaatcgagttcgggctcacgccggtgacgatggcgatatcattcgcgtaacgggaggcgttcttgttggacgcaacctgttcgagggcctcggagccggccttctggaaggcggccttgagttcttcgctctccgactcgttggcgaaccactgggcttcggcggcgatggtcttgccaaggccgatgaagctgccgttcagggcggcgggatcgttgtcgtagtaggcgcgggcgaggtcttcgcgggcggaggcccaccgatcatcgaagaggatagccttgttggcgtcgaagcgcggagcgacctgcttgggccagtcggagccaagttcggcttcaaccgcggccacgacggcggcgttctcgtcctcggattcttccggagccggagcggccacgccgagctcgttcagcacgaagcgggcggtggcggcgagcacgccgttggaaccggtgaccttctcggcgaaggcgtcgagcgcggcggaatcgaccacagcgccaccagcggcaccaccggcggacggcagggccacggcaacacccttgagctgggcgacgacctcaacggccgcatcaatcagcttgtcggcttccggcttgttctgcacggcggcggtgggcagcttggacaggtcgccgccacgggagctggcaccctcgcgagtgtcgagcagcagtgtggcgagcacgctggccacccaaccttcaccgagctgccatacgttggtcacgcggtcgcggatgtactgctgcttgacgccggcggcaccgaacagcgagcgcaggcggtcgcgcagcgcctcggagagcacggcaccgaacggcttgtagttcggggcggccttgttgacgatttgggcgagcttgtcgagcgtcgcttcagcagcaccgtccacgctggcgactcccagctcggagctgatgtccatgagcagctggttgcggcgagaagagacaccgttggtcagggtgtcagtggtgtcgttgctgccgatctggtcgatgcgcaccttggcggagtaggccatgagcacgccgatggcatcggaagccttgaagggcaggtcggcgacggcggcaccggacggtgcgccggccgcggcctgccctgattgcaggccgcgcgaggagtcggacagtccagtggactgtccggcgacggagccatccgttgtctgagcagcctcagtcacggcatttgccggagcggcaccggaaccgagcttggcgacggcggaaccaccggcaggagcggtttcgaccggggccgaggccgcagcctcttccggctcatcgtcgggaaccagcgaatcggtgtcggtcatgtagacgcggccttcatcgcggccgacgttgtagacgaccgtatcgttgccggcgaactcgggtagacgcagggtcttggcaccgaggttggccagggtcggggcgttgccgaggccgacttcgacgtattcctccacgccgaggccgccctgttcgcgctgaccgaagagcagcgcctgggtttcaatccaacgcaccggggaggcgaactgccaggagagcagttcggtcaagagcagacggccgagcttctggtcgtcatcggcgtaggaatcccacacggccgggtcgtcgagcacggccttgatacgctcggacggcacgacttcgaggatcttggcggcgaattccttggtcatctcgaacggggtggccaccaggttcgggatgtagcggtccaccagacggccacggtagtcgatgtaagcgggaagcagcgcgtcgagcttgtcgcggaattccggcacgcccttgcgcagcagtgtggagtggaacggcacatcgatgccgggcaccagcatgaacgcgggcttgccaccgaatgcggccacgcggcgggcggaatcggccttcagagccttgagtccggcgatcgtaccggcgatggcgtactgctggccggcgaggttgtagttcacgatctccaggaattcgccggacgccttggccacggattccacgtattccttgacgtgcgcgtcgtccacaccgaactggttcgggcgcagggcacccatgcggtagttggagcgaccctgtgcgtcacgctcgatgaggtggtgcatggtggaaccacggtggaacacgagctccagcacggtttccagcggaatcacgtcggcgaacgcggacagcgcgttgtattcgccgagcgagtggccggcgaagtaggcgggccagatgtcggcgccggcttcgcgcagacgagcggtctgggcgaaggccacggtggcgagcgccacctgcgtgaactgcgtcaggttgagcaggccttcggggtggcgataggtcacgccgttggcggtgagctccttcgggttatcgcgcacgaggcccaggatcgagaagccgagcttggagcgggtgagcttgtcggcgcgttcccacacgtcgcgggcggcggcggacttggcacgctcgtccagaaccatgccctgcttctggatgccctggccggggtagacgaaggcggcgcgcggcgcgcggaccagtgcggtgccgcgggagacgagctggccgtcgatacggcaggtgacttcgagggtcatgccgccgtggcgcaccttgccgacgcgctcgacggagatttcgacggtgtcgtcaagctgaaccatgccgtacatgttgtaggtccagccggcaatctcgtagtgggcacccttctcgtccagcgcctgcacggcgtgctgggcggtggcggacagccacatgccgtgcacaagcggagcggccaaaccggagatgcgagcgccacgagtggaggtgtggatcgggttgaagtcgccggaagtgcgggcgaaggcggtcatgtcgtgtggggcgacgaccttcacgcggcgcagcagacggcgcggcgtgggcgcgatctcctcgtgctcggcgtcgccgaactcgggggcgtctgccggcaaagcatcggagtagacgcggccgcggatcgcgaaacgctcggtttcgcgggcaagcagcgtgccgtcggcagcggtgtgggtcacgtggatggtgaccacgcggccggaggcggactcgaagtaatcctcagcccaagacttcagggtgatggtttcaccggtgtgcttaagcaggtcctcctcgttcacctcaagttcgatgaggtggtcgaggtggacggcgttgagcaggccttcaatcaccgggtagcccttgacgtacacggagccgagcgccgtgtaaatcgccggccaggccgggccgaccagcgcatcgggagcgatgcggctgggctgcagggtcgtcggcagagcggcgccggtggccgcttcgtggtcgaagccgaggttggcggagagggtgtaggcggcggtggcggtagcaaacggacgctcgtcagaggtcttgccgtcaagctgcggcatctcggtgagcttgtcgccggtgatggcggtgttgccgatgcctgcggtggcggcgagcatcgcgtagacgtccggaatcaggcgttcgcggtccacgaccggcacacggccgggctcggtgccttccacgatgagcgggatgacgatatcgcgcacggcgtgcttggaggtgccgccgtccgggtcgttgtcccagtaggtgtcgaggtggatgtccagatcgtacttgccggccgcggcgtcaaacgcgcggatctcgtagtactggtcgcccagggcggtgccgtaggcggggttgtcggtgatgtggccgacccaggagatgttcggggacttgcggatgaagtcctcggcgctggtggcctcgccgagtgcggcgaaatcgtcgttctcagcggcatcggcggcctgctgttcgtcctgcacgcgcttgatggcggcggtttcgaagcggccgaggatgtcggcgatcggctcgtcgatggtggtgatgccggcaacggagatcgggccggggatggcacgcacggaatcggcggagtagcgctggtcttcggactgccagagctggtcctgaccccaccaacgcagcaggtcgttgtcgatgacgggtacgaacggcatgggcttggggtattcgcgcacgagcaccgggaaccaagccacgtcggtcgggaccaccttgagttcggcggtctgcgggtaggccagtgcgagcttttcgagcgcgggggccgggtcggcgagaatgtcgtcgtgggtcagcaggccagcggcagctgcctcttcagcagaaacgccatcagcggcgaacaacttggaggtgaattcgccggagtccgtgtcgttcacacgggcttcgatgcgctgcagcaggtgctggaagcggtcggcgtaagtcgggtcgacccacgggaaggcgagttcggcgaagcgccgcgcccactcaaggtaggtcatggaggccaggtcgccgaagtaaggcttggcggtcttgttcagggcttcgatgatttccttgcggcgggagtcgagctcttcggggtgcttcatgacgcgcacgagcagacggccgcattcggcggagtcgttctcgagctcgtaaatgtcggcgtgcaggtggctcaggccggaggacatgccaccgacggacttgccggacggcacccagtgggcggcctgcggggcgaacacgtcgtcggacttggcgtcggccggaataccgggcgtcttgacgagcagctgcttgacttcggggctggtgtgagcctccttggcggtcatcgcggcggtaccgataagcacgccgtcgaccggcatgtcgggcaggccgtaggcgtgggcccactggccggaaatgtagtcggccgcgcgttcgggggtgccgatgccgccgccggcgaccagcacgaggttgtcgcaggcgcgcacttcggcgtaggtggcggcaagcaggtcgtccagcgcttcccagctgtggtggccgccggcttcaccgccctcgacctgaaccatgatggtggtgggggacacggccttggcgatgcgcacgacctggcgaatctggtccacggtgccgggcttgaaactcacgtacggcaggccgtcagcctgcaggttcttgatgagctccacggcttcgtccagctcagggatgccggcggagacgaccacgccgtcgatcggcgcgccggatgtgcgcttcttgggcacgatgcgggaggagccgaactgcaggttccacaggtaacggtccatgaacatcgcgttgaattcgaccgtgcggccttcctccagctcgtcttcgagggcagcgatgtggcggtcgaatacttcggcggtcacctggccgccgccggcgagctcggcccagtagccggcgttggccgctgcggccacgatttccggttccacggtggtgggggtcatgccgggcagcagcaccggcggcttgccggtgagcttggagaacttggtgaccagcttggcgccggccggggtgttgatgacgcgcggggcgaacgccttccagttctgggtgcgctcaggctcgctttccagcgtggagagcgtggagcgctcggccagcgtggtggcttcgaccacgccgatgccggtgccctgcaccacgttgccgatcagcttgccgagcgtgttgccggggccgaggtccacgatccacagcttggacgggtcggcgtcgtcgaacagcgccttgacgcgggcgttccagtccacgtggttcaggagcacttcctcggcgagtgcacgggtgcgcttctggtcgaagccgcaggcgccggcccaggccacggtctgttcgacggcgtcggtcatgagcggcgagtggaagggcagggtgacctcaaggtattcgagggtcgggttgaacacggtgccgccgtggagcttctgctcgcgcagcttggcctgatgctggtgttcgcgctcggcttcgagggcgaaagcggccaggtcttccgggtagccggacagcacgtggtggttgtcggagttggtgacggcgatggagatcgggccgcgagcgttgttgacgcgggccaccagcgcctcgacctgggcgcgggtggcgcccttgacggagagcatcgggctggcttcgccgtacttggggttcaggcccagttcgcgcacgcggcgggttccggcggcgccgatcagggcggccacggccagaatctcgtcaagcgtggtgccggcggcctcgatggagccggcggcctcgatggcgcgggtcatgtgcacggcgagcacgccctgggagtggccgagcactgcgagcggcttggcctgggccacgctgtagccgaggtgttcgaggtcgagcagggcgccgagctgggtcagtgccacgccttccacggacgcggtggcgtcggctgcggcgccgaggcgtgccgggttcggggcgaagccgaacaggtcgaccggacggccggtggtggccagcaggtcggcggcgaccggggtgagcagtcggccggctgcggcgacgtggccgcgcagggcctcgtcaaggctgggatcggtggtctggtctgccagggctaccggccacggggtggactggccggcgaaggcgagcgcatggggctcggtggctaggcgattgaggaagaaggtggtcattgctttccttacttgtgtttggttgacgtcttcaaaaatcagaggggctggttgccgtggtgtttggtggtgcgcttgacgcgccgcttggtggcgagcgtggccagcgattcgacaatcacctcacgggtctgttcggggtcgatcatgccgtcgatctgcccgatttccagtgacaggttcgcgttgacggtgctggtctcgtactccttgatgtacttggcccgcagcgcatcgacgtcctgtccggaggccttggccttggccaggtcgtggcggtggatgatgttcaccgcgccggccgcgccgagcaccgcgatctgggaggagggccacgcgaagttcaggtccgcgccgatggccttggatcccatcacgatgtacgcgccgccgaacgccttgcgcaacaccacggtcaccatcggtacctgtgcgttggcgtaggcgtagatcaccttggcgccgcggcggatgatgccggcgtgttcctggtcggagccgggcttgtagccgggcacatccacgagggtgaccacgggcaggttgaacgcgtcacacaggcgtacgaatcgggcgactttctcggacgagtcgacgtccaggatgccggcgagcacgttcggctggttcgccacgatgccaaccggcttgccgtcgatgcaggcgaagccgacgagcgcggaggcgccgaacagttcctgcacctgcacgaattcgccgtaatcgacgatgcaacgaatcacttcgagcatgtcgtaaggctgacgttcgttggtgggcacgatggtggcaagtcgcttggcggtctcgcgttcggcgcgggtgacggcgtatgcgtagaccggcggcttgctttcgctgttggacggcaggtaggcgagcacggtgcgcgcatagtcgatggcgtcggattcgtcctcgccgaggtagtgggccacgccggacacccggttgtgcacttcgccgccgccgaggtcggccatggagatggtctcgccggtcgaggccttgaccacgtccggtccggtgacgaacatgttcgagttctcacgggtcatgatgatgaggtccgtcagggccgggcagtagacggcaccgccggcgcaggggccgagaatcaggctcagttggggcacgaagccgctggcctcgcaagtcttgcggaagatgcgaccgtactgggtcagggcggccacgccctcctggatgcgggcgccgccggagtccacgatggccacgatcggcactttgaggtcgatggccatgtccatcagtcggcagatcttctcgccttcggcggtgccgagggtgccgcccttgacggagaagtcctgggcgtagacggccactttgcggccgtagacctggccgaagccggtgatgacggccgcaccggcgttgccgccggcgatattgccgccctggaagcggccgatctcctcgaacgtgccggtgtcgaagagcaggtcgaggcgttcgcgcgcggttttcttgcctttggcgtgctgcttgtcgcgggcgcgctcttcggcggcgcgggccagttcggcggccttgaccacagcggtgcgcagcggctggtgggccgaaggctgggcggcgttggcggccgaggccgcagccgcggccttcacggcctgcgaatccatgatgtcagtcattgccaccctccttcttggcgtcggcggccttatcggctccttctgacgagggagctgtcgacgcagccgcctgagggagagatcccggcgcagccgcagcagccttggccttgccggcgttcacgtccagcgtgaccagcgtgtcgccggcctccacgccgtcggccgggccaacgaaaatcttcttcacttcgccggcggccggcgcgtacacgtagttctccatcttcatggattcgagcaccaccagaaggtcgcccttggccacttgctggccttcggacacgttgatgcgcgtgaccacggcctgcatcggggaggcgatgacgccggatttggcgccgtcgttggccgcggcggcactggaggccacgttgtgcagtcccgcaccgcgcaacggctgggtgggtcgcttggcaccgcgggcgcgggccgagccggtgatgttctccacgatgtcgagtggcacggtgagcttgacgcggcggttgttcatctcgatgacgaacgtctccgacttggacttgtcgggcgcggccggggcagcggcacccggggcggcggccaaggaggccggctggccggaggcggcggaagccggtgtgcggttcaggtacgtgcgctccagccacttggtggacacggcgaacgggtggccatgctcggcggtgaagtcgtcgttgcggaagatttccttgaacagcggaatcggcgtgggcacgccttcgatcacaagctcatcgagcacgcggcgcacacgggccacggcgtcgagacggttctgggcggtgacgatgaccttgcccatcatcgaatcgaacttcggggagatggtgtcgccctgttccacaccggtatcgatgcgcacgccggggccggccggccactggatcttctccaaggtgccggagccgggggtcaggttggtggccgggtcttcgctggtgatgcgcagttcgaagctgtggccgcgcagttcgggggcgcgggtgagctcgccaccggcggcgatattgagctgttcgcgcaccaggtcgaggccgctgacctcttcggagacggtgtgctccacctgcaagcgcgggttgacttccaggaagtacaccttgccgttcggggtcaccatgaattcgcaggtgcccaggcccacgtagccgaccgtggtgaacaggcggcgggagtattcctcgagcgtgctgatgatttcctcggacaggaagggcgcgggtgcctcttccacgagtttctggttgcggcgctgcagcgagcagtcacgggtggagtacacggtgaagttgccgtgcgagtcgcgcccggactgggtctcgacgtggcgtgccttgtccacgaacttctcgatgaagtattccttcagatcgccgccttgcagcgcgtcgtggttcatgtagaagcggcgcagctcctcgtcgtcatgcaccacggtgatgccgtggccgccaccgccatcagtgcgcttcatcatgatcgggtagccgtgggtgtgtgcgaagtcgagcagcgtgcgcacgtcggtcaccggttcggacaggccgggcactggcggcactttggcgcgtagggccacgcggcgggcggtaatcttgtcgcccaaatccaccagcgcagtgtggtgcgggcccacccagatggcaccggcatcctcgaccttctgcgcgaagctcggcacttcggaaaggaatccgtagccggggtgcacggcatccgcaccggtcttgtgcaggatgtcaatcagcagatcttcgttgaggtacgtgtccttgtaggtgtcgccggagagcaggtatgcctcgtcggccatgtccacatagcggctattgcggtcctgttcggagtagacggccacggtggagatacccatctccttggccgtgcgcaccacgcgaagcgcaatctcgcctcggttcgcaatcagcagttttttgacgatagaagccatagtgtcaaattgtgctctctatatagaggagagggcaagccgcgttcacacaaaagctttcacgcccttttgtaggctacgaacaaacgcgcgcgtaggttccggcaacgtaaccgttggcgccggctatcaaaaacgttgcaaatccgccgattgcacatccttgcgcgccggctcaagaagttgacgttacggttgtgttcgtcaacttatgacaaatcgaaatcgacaattttgtaaattggtacgaaaccgcacgaaatcgaacacctctaagatggcaaccgtaagttcgggggaaggctcatctgcgggcgaacggaaggtgaccggaccggcatcggtccatcgccgcacgattcgcccgcacagggtcggattcatttgggaccgtccaccatatggacggttcggactgtcggggataccgcacgacccgccggaacctcccctcatccatcgcataccgcccgccgttcacggcgatatcacgcaacataggggtcattgatatgcagacttcacacaccaccgcatccgctgcggccaccacatcgctcgcccgtcgtatcgtcgccgcatcctggaagccggtgctgttcgccgtgctgatgtggctgtccgcggccgccggcgagattccgattccgggcacgccggtgccgatcacgctgcagacgttcgtggtgatgctcgccggtcttatgctgccgtggcgtcaggccggcgccgccgtcgccacctatctggcggccggtgcggtcggcctgccggtgtttgccggcggcacctccacgctggccctggtcggcccgagcgccggcttcctcttcggcttcctgccgggtgtggtggtcatcgccctgctgcgcggcaagtccgacacttcgtccttcgcggccgccgcgcgcaccgcgggccgctacctgctggccgcgctggtcggcggcgtcgtggtggtgtacgccttcggcttcgtcatccagtccgcgctgaccggtgcgccgctcgccgccgtggccctggcctccatgggcttcgtggttggcgacgccatcaaggccgtggtggcctctctggccgccgccggcctgtccaagctcggtcgctgacctgagctactagctagctactggccggctattacagcactcccacatcggcggtgcggaccgtatggtccgtgccgtcttgtgttctcaggatcagtgaggcgtcttcgttgaggccgatggcttcgccggtcagcgtggtgccgtccgtgaagtgcgcctcgacctgacggccgcgcgcccagcacaccgccttcacctcctcgcgcaacgactcggcctggcccttcgggtcggcgatgaacttcaccaaccgctcgcggaagccctcgacctgacgttcggccaccgcatcgcgcatctcgccgaacgacggcagcccggagacatgcagctgcagcgaggtcgattgcggcgtgggcagccggcaggcgcccaaggccaggttcaggccgacgccgaacacgatgacgacgtcgtcatcggcatcagcatcagtaccggtaccggacgacggcggaatcaccagttccgagagcagcccgcccagcttgagcccgtggcagaacacgtcgttcggccatttgagttccagcgagcagtccggctggttcggcgcggcaccgtattcctcgatcatgccgttcagggcgtccagcgtgaccagtccggcgatcatctgcagccagccattgacggattcgtcggtggcgatcgcgcgcggaatgcgcacggcataggacatcgtcgagcaacggccgggctgactgacccacttgtgaccattgcgcccacggccggcggtctgccggtcggcggccaccacggccaccgccagttcgccatcctggtggtcgggcaacgtcaacgacccgtcgccaatcatctgtacggccagcgcgttggtcgaatcggtttcgtccacggcgaccacatgatctgcgacggctgtagttctgggtagctgtggcgttgcagctttcaacgcaatcatcatgggcactacgttacctcgattttggcgcgatatgcccgcgttattccatggaaaagcgcgcaaaatcaactattttcacccacatagcccatgttaacgttcacaacttcggaaattccacattcgccgaacccacgcatgcacccggccgtcgtattggcttgcgaacaatggcaatgcccggcagacatcgaatatcaaccgttgacctgtgcggctaccatatattgtcatgacgtcaccagccaccgcgaagcttgccgccgtatccagccgccagtcccacccgcatcttgcgcgcgcgggcgctgccgcgcgctggacactggccgtgctggccggcctgtggcttgcactgtgcacggcggtcggcccgctgtactgggacgaggagaacggcaccctcgcccattggaactgggccaataccgcaatattcgtcgtgtcattcctgatatatctcggaatcatcacgctgatggtgcgattcgcagcaggccagcgcatactgccgagggctaccggcgagcgactgcgtcaacatcagcagaatagcgaaacatcacggcccgccaccgatcagcaggccagccaaccagccaagacccgtcgtaccgttcgcgctatcgtcacgtccaccgtcactattctggaccgctggatcacacgcggcacgaaccggttctggaagcttatgctggtgttttttgtcggctggctctgggtgccgaccactctgctggccgcattcggtgcggacctccgctcacagatccgtgaattcagctgggcctggaaccagtggaccggcctgaaacagccctatatcggcttcttctccttcgtgccgatggacatctaccccactgcgcactacatgtggccgtccgatcccacgtatctgaccgaccagcacaatgtggtactcactgtgttctatggcgcgatggtcacgtttgcgaggcatctgaccggctcaaacgatgccggtatcgtgacgttggctgccctgcagacgctgttcgccgtgttctgctgcgctgccgccgccaatcgattcctgaaccggccttggataggaaaaacggcaacggattccgccgctcccccacaggccggaggattggctcgattcctgattctgctgttctttatggtctgcccgctggccgtgttttccactatctccatcaccaaatcgccgctgttcgcgttctcgttcgtctggtggttcagcgtctggtatgaactcgtccagacctggcaccccgccggcacccgcaaacatcctcagacccctgccatcgccacgcccgtccacttgccgcgtcacagtttcatcgcctttatcctggccacgtcggtaatgctgatttccgcgaaatatgcgtggtacatcatcgccctacaaatcgtgctggctctgatcgccgaccgcaagcgctgggcgacttacgtcgtggcgctgctcatccccaccgtgctgattcacggcggcatctccttcgccatctcctctggcgcgatcatcggcggcgacccaatcgaaagccgcggcgtacagctgcaaatgatcgcccgcgtggcccagcgcaatccggacggcatttcagacgaagccaaaaagaacctcgcgcccgtcttcaatctcgatcagatggccgacgcttactcccagcaggacgccgacccggtgaaatcctccggcattcaggccaagaaggtcagctacaagtggcgtacggtgacgcccgaggatatgaccaatttcaacaaggcatggttcgaaatcgtcaaggacaatccgatcatcgcgctggatgcgttgctggccaaatgcttcggatacttcaatgtgaacgatcagccgtacgtatcgatggattattacgtgaccagcgattacgtgcagaaaaactccacatggatcaaggattacaaccatgactggcgtgagcacatcgccggcttcactcgcgtatggggcggtattcccgtactcggctggcctacgcacggcaatttctacgtggtgatgacattgctgatcggcgcggccgaggtgattcgccgacgttggctcaccctcatgacccatattccgctgctactgctgatgggcgtgatgattaccgcgccggccaataatttcgagcggcacatgttgccggttgcgtttgtattcggattcgtggtgctgacgtattggcgagagtctttggctgaaaggcaacgccaatcagcgacgctacactagtgactatgtcagattttctcgaacttcttgctgccgacgttgccgattcgtccgcacccggcatcgccgcgaccaaccgcgtacgcaccgtgctgttcgagtgcctgttcaatcatctggccgacgaacgagtggagtccctgttcaccatcctcggcttcgagcatgacttcgattgttacgccatcgccggataccctgcccggtccgccgcacgtacggccaaggaaatcgagaaaatcgtggccgatttcggcggtgtgtgtctgaccgccaagcgcccgatcggcaacagcaccgccgtagtggcgttgattcgtccggtcggtgcggccacgccggaaatcatctgcaataccatcgacccgtcgttcgccgccgatcggccaatcgccttgggtccgcagcgtaccggtgccgatggcgcgatgcgttcgattcaggccacgctctactgtcttcaggccgcgccggctctggccgccaccgtgcagccatcgccgcgcccgttacgcaccgacgacgccctgcccgaacgtgcgttgatcggcgacgcggacgcccgtgacgaactggtccgcgtggtctacggaagcctgacagcagcaggcccggatgatccgacgctgctcaccgtctccacattcctgaagttcggcggttcgctcgagaccacggccaaggagctcaacgtacatcccaatacgatccgctaccgtttgaagcgcgccgccgaatccaccggctgggatgccaccgacccgcgcgaggcgtacgtgctgatcaccgccatcgcgctgggtcgtgtggccgaagcgcagcggaccgcagcgtagtcgggcagaagcataaccagcagaaccgtagccggcaaaggccatagctgaccgggcataaccgtccagcccgacagcctagcgggccgaatcaggctgcctgaatctcgtgtacgccatcgtgcagtaacgcggccaaggattcttgagtggctaacacttcgtccacgaatccaccggcggacaggctggcgatcacgcgaccggactcgttgtccacaatcggtacaccaacggcaccgacacccaacgtcacatcctcatccgacagtgcatatccacgttcgcgagtcaagcgaatatcctcgcgcaactgttccacactgaccagcgtgttctcgttatatgccgggaacggagctcctgcaagatagcgttcggcatcggcatcctcgaaatacgccaaggccacgcggccggccgcgccagcatgcagaggcagcacgcggcccgggcgcaggatcagcgaatcgatggcatgaccttgcgcgcattccacgcataccaattcagtgccggagaccacactgaggaatgatgtcatgccggtttgcgcggtgatggcatgcatgaccgcaatcgcaggctgccattcggtacgagacgtgcgagcggcatcagccaatcgcagccagtccagtgataatgagtagttgccatccgtatccgttacggcccaccccacatcgaccagtccatccagcacgcggtatacggaggatcgcgggatatcacaggcgtcggcgatatctgccggagacaggccattctccgccgccaatgcgtccatcacacgactcgccttgtctaaagcacgggtcggttcacgtttgtcttccgccatcgccgacgttccttccccctgacttatccctgactcatcgtattcaactgttcaggccaagataatcaccactgtatccaaggcctcgcgacacctcgcggccggcagtctgcaccaattgcaccatgtcttgagccgatgccgttgccggtttcccatctaccagacaggccagctcaggttccaaggagcgggaaaggccactcagggcgattgccgcctgaatctctccggcgtgattgaataccggtacgctgatagtcacggagccggccatggtctggccgacatcataggtgaagccgcattcacgtatatgacgagcctgtcccattgctgtggtacgcatcgtggagaatgtgccgccgagctcgttgttataggcatagtgttccaacagctgctcgtagcgagccgggggaagccaggccgtcagtacatgagagggagcgctcatgctcagaggcaagctattgcccaccagctgtgcatagctttgcaacgcctcacgggtgcgtgtctcgatgcacaccgtgcgcaatcgcctccgaacgaacagaccccagatgccgaactggccgcgatgggcgcggaaggtacggcgagcgatctgctgaatgtccagtctgctttcgatttggccgccgatacgtacgcaatcgatgccaagccgatactcgccacgattgatgccgcgttccacccaaccgactgcggcgagattatccagcaaacgatacgttgagcttacgggttcaccagtacgttcgcttatggtttttgcagtgcttggtcccagttccgccaatacatcaagtactgccttggatttcaccaatgcatctacgctacggtcatcacggcttggcgccaccatgcgcgtcacctcctggcctgtatgttgatacctcagccatcttaccgggtattcagcgggttgccgcccaaaacgcactgggccccggcaggagtatcccgtcgggccccaagaggtttctggctcccctctttgagggggagccgtccgcgcggcggaccgggggaggtccgagacgctaaggcccaaggacgcgagaaacaccccgacgcgcgggtgtcctgatatggggaaagccccttggggcgtgtgctccaaggggcttcctgtacgtgtgatgcggcggcgtgctactctcccacaccctgtcgggtgcagtaccatcgccgtgccaggccttagcttccgggttcggaatgggaccgggcgtctcacctgggccgtggccgccgcaaatcttctcttatacggtcagacgctggggtctgccggcctgtggcggcctgggaaccggacagcggacgcggatgtgtcgatgtttcgtcttgtggccagacaatgctcattgccgtctggtgccgtttgcaggaggaagatgcggtccaaccgccaggggctggaatgttagtgttgcctttcgtccgttagtaccggtcggctccacccctcgcggggcttccacgtccggcctatcaaccacgtgttctgcatggggactacaggaactcgaaggttccacggaatgcttatcttggagcaggcttcccgcttagatgctttcagcggttatcccttccgaacgtagccaaccggccgtgccactggcgtgacaaccggcataccagaggttcgtccacccaggtcctctcgtactatgggcaggcctcctcagcattccaacgagcgcagaggatagagaccaaactgtctcacgacgttctgaacccagctcgcgtgccgctttaatcggcgaacagccgaacccttgggacctgctccagccccaggatgcgacgagccgacatcgaggtgccaaaccatcccgtcgatatggactcttgggaatgatcagcctgttatccccggggtaccttttatccgttgagcgatgccgcgtccgtacaccggcaccggatcactagtcccgactttcgtccctgctcggaccgtcgtcctcgcagtcaagcccgcttgtgcacttgcactcgccacccgattgccaaccgggctgagcggacctttgggcgcctccgttactctttgggaggcaaccgccccagttaaactacccgccaggcactgtccctgaacaggatgactgttcgaggttagacatccaatgcgaacagagcggtatttcaccttacggctccgcgcgatctggcgaccgcgcctctcggcctcccgcctatgctacacaatccacaccgaatgccaataccaaggtatagtaaaggtcccggggtcttttcgtccttctgcgcttaacgagcatctttactcgtactgcaatttcgccgagctcctggtcgagacagtggggaagtcgttacgccattcgtgcaggtcggaacttacccgacaaggaatttcgctaccttaggatggttatagttaccaccgccgtttaccggggcttgaattcaccgcttcacccgaaggctgacggatcctcttaaccttccggcaccgggcaggcgtcagtgcatatacagcggcttgcgccttcgcatgcacctgtgtttttggtaaacagtcgctaccccctggtctgtgccacccccaaaagctcccacagcaagcgtgttcaccatcgggggtctcccttaaaccgaaggaacgggagtgatttgccgagttccttgaccaggattcgctcgatcgctttggtattctctacctgaccaccagtgtcggtttggggtacgggcggcttcgagcctgacgccgaagcttttctcggcagccgggatcaccggatatcgggccataaggcccccatcatcgcacctcggacccatgcgggacggatttgcctgtcccacgccctgcgtgcttgaccacggaagaccacctccgcggccggctacccttctgcgtcactcctgcgctgacctactacaaggatcggtcccaacaggccagggcatcccgcccccgaaggagcagtaagcccggacccggaggttagtactccaagcctcggttttggcggctgaaagccggtacgggaatatcgacccgttcatccattcgactacgcctgtcggcctcgccttaggacccgactcacccagggacgatgaacgtggccctggaacccttggtcatccagcggacgggatcttcacccgtctctcgctactcatgtctgcattctcactcccatgaagtccacggcgcgttcacacggccgcttcgcccctcatgggacgctctcctacccagtacaaaatactgccgcgtcttcggtggtgtgcttgagccccgctacattgtcggcgcggaaccactagaccagtgagctgttacgcactctttcaagggtggctgcttctgagccaacctcctggctgtctatgcgactccacatcctttcccacttagcacacgcttcgggaccttagacgacggtctgggctgtttccctttcgacgacgaagcttatcccccgccgactcactgccgggatacgcgtcaccggtattcggagtttggttgctgttggtacccgatacgggcccgcaagcatccagtagctctacccccgggacgtaatgacccgacgctgcacccaaatgcatttcggagagaaccagctatcacggaatttgattggcctttcacccctagccccaagtcatccccccggttttcaacccaggtgggttcggtcctccacgcggtcttacccgcgcttcaacctgctcagggctagatcatcccgcttcgggtccaggacacgcgactcaaacgccttttaagactcgccttcgctacgcataccccacacgggttatgctcgccacatgccactgactcgcagactcatttttcgataggcacgccgtcaccccacaaaagggctccgacggattgtaggcgcacggtttcagagactgtttcactcccctcccggggtacttttcacctttccctcacggtactcgttcgctatcggtcagacaggaatattcaggcttacccaacggtctgggcggattcgcacggggttccacgggacccgtgctacttgggagacgcgatcggcagaccatgcgcgttcaggtacggggccctcaccctctgcggcccggtattcaacccggttcccctgacacatggttttctgcaactgccggccggcccgtcggagccggcgcacgcgatcccgcaacaccccgcgcgcaacccccgacgggtatcacacgcgcaaggtttggccatcatccgctttcgctcgccactactcacggaatatcctttcctgcaggtactgagatgtttcacttccctgcgtaccccccggccgaagccggtaccgacccatgacggtcggtgggttcccccattcggaaatcctcggatcaaagccctgttggcggctccccgaggcatatcgcagcctcaaacgtccttcatcggtcctgtctgccaaggcatccaccatacgcccttgcaagcaacacacaccacgaaagtgcatggccgcaagattcctctagcaaattcccagacgacaaatcatcacactaaaaatgatcacaaaacgatcgaaacgaacaatagagttcgattcgaaatcaacagcaaaacaaagattcaaaaactcttgttttgctcgcgtccactatccagttctcaagccaccacgcaccgccacgccatcgcgccggcacacggccggcccccaggcacgacgggcatcgaatcgcgccaggcaaaaagcctggggtggcgatccgggagcccaaaagcgcatccgcaccaccccggcacccaccgcacgaccggcggggcaaagccaacgacgtcttccacaccagcaaccccgccgccatcgcaccatgcgacgcgcggggcgcacaccgtcggacgaacatccgactgaattctccgtagaaaggaggtgatccagccgcaccttccggtacggctaccttgttacgacttagtcccaatcacgagcctcaccttagacggctccatcccacaaggggttaggccaccggcttcgggtgctgcccactttcatgacttgacgggcggtgtgtacaaggcccgggaacgcattcaccgcgacgttgctgattcgcgattactagcgactccgccttcacgcagtcgagttgcagactgcgatccgaactgagaccggttttcagggatccgctccgcgtcgccgcgtcgcatcccgttgtaccggccattgtagcatgcgtgaagccctggacgtaaggggcatgatgatctgacgtcatccccaccttcctccgagttaaccccggcggtcccccgtgagttcccggcataatccgctggcaacacggggcgagggttgcgctcgttgcgggacttaacccaacatctcacgacacgagctgacgacgaccatgcaccacctgtgaacccgccccgaagggaagccgcatctctacgaccgtcgggaacatgtcaagcccaggtaaggttcttcgcgttgcatcgaattaatccgcatgctccgccgcttgtgcgggcccccgtcaatttctttgagttttagccttgcggccgtactccccaggcgggatgcttaacgcgttagctccgacacggaacccgtggaacgggccccacatccagcatccaccgtttacggcgtggactaccagggtatctaatcctgttcgctccccacgctttcgctcctcagcgtcagtaacggcccagagacctgccttcgccattggtgttcttcccgatatctacacattccaccgttacaccgggaattccagtctcccctaccgcactcaagcccgcccgtacccggcgcggatccaccgttaagcgatggactttcacaccggacgcgacgaaccgcctacgagccctttacgcccaataattccggataacgcttgcaccctacgtattaccgcggctgctggcacgtagttagccggtgcttattcaacgggtaaactcactctcgcttgctccccgataaaagaggtttacaacccgaaggcctccatccctcacgcggcgtcgctgcatcaggcttgcgcccattgtgcaatattccccactgctgcctcccgtaggagtctgggccgtatctcagtcccaatgtggccggtcgccctctcaggccggctacccgtcgaagccacggtgggccgttaccccgccgtcaagctgataggacgcgaccccatcccataccgcgaaagctttcccagaagaccatgcgatcaactggagcatccggcattaccacccgtttccaggagctattccggtgtatggggcaggtcggtcacgcattactcacccgttcgccactctcaccaccaggcaaagcccggtggatcccgttcgacttgcatgtgttaagcacgccgccagcgttcatcctgagccagaatcgaaccctccacaaaaaacctcatgaaaagcatccgaatagatgactctcaaaacaaaaattgacgagcacgtccttaaggaaggacgccctcaaaaaacctcacccctcatcaaaccctcccgggtacccaaccaccacgacaggcaatcaggcgaggaatgaactggcaatcattgactataaagaagtagtacaaacacgctcttgagttctcaaaccaccaccactcacccacctcgcggccctccggaaggagaaccactcgccgagcggcagcaagggaataacttacacgcattcgcggactcgcgcaaaccgggcacgaaaaaacacgccagaatcgttgcaacgacagcgttccatcggcgtgtcgaaatcgacgtttcgcacgcccatatcttcagtccagaaccagacaccgtcgaaaaacggattgaaaaaattggccgatgggcatgtcgcgaatcacctcttacggcgcatgcggcgcaccgccaattatcggaatcatcattgatccagcacaccgataagaaccattatgtccggatcactatccgctcgccagtcgcgcaccaatcaaccgcctggtagcgatgcggttgccgtaccgcttgccttggcacgaccaacgaccgaatggcatcagcacattcagaaccgccggtccgatccacacatcgcagcacggatcagtcgtggtcccacgggtacggggaggccccgtcgccgtgtgggtgccggaggtgtcctgtttgtgtccgggcatgcgagaagccccgggtgtttttgtgggggtgtgtgggtttgggtcgtgagtgtttcggatatgggaaagccccttggggcgtgtgctccgaggggcttcctgtacgtgtggtgcggcggcgtgctactctcccacaccctgtcgggtgcagtaccatcgccgtgccaggccttagcttccgggttcggaatgggaccgggcgtctcacctgggccgtggccgccgcaaatcttctcttatacggtcgggaacaatgtcccgccggcctgtggcggcctgggaaccggacagcggacgcggatgtgtcgatgtttcgtcttgtggccagacaatgctcattgccgtctggtgccgtttgcaggaggaagatgcggtccaaccgccaggggctggaatgttagtgttgcctttcgtccgttagtaccggtcggctccacccctcgcggggcttccacgtccggcctatcgaccacgtgttctgcatggggactacaggaactcgaaggttccacggaatgcttatcttggagcaggcttcccgcttagatgctttcagcggttatcccttccgaacgtagccaaccggccgtgccactggcgtgacaaccggcataccagaggttcgtccacccaggtcctctcgtactatgggcaggcctcctcagcattccaacgagcgcagaggatagagaccaaactgtctcacgacgttctgaacccagctcgcgtgccgctttaatcggcgaacagccgaacccttgggacctgctccagccccaggatgcgacgagccgacatcgaggtgccaaaccatcccgtcgatatggactcttgggaatgatcagcctgttatccccggggtaccttttatccgttgagcgatgccgcgtccgtacaccggcaccggatcactagtcccgactttcgtccctgctcggaccgtcgtcctcgcagtcaagcccgcttgtgcacttgcactcgccacccgattgccaaccgggctgagcggacctttgggcgcctccgttactctttgggaggcaaccgccccagttaaactacccgccaggcactgtccctgaacaggatgactgttcgaggttagacatccaatgcgaacagagcggtatttcaccttacggctccgcgcgatctggcgaccgcgcctctcggcctcccgcctatgctacacaatccacaccgaatgccaataccaaggtatagtaaaggtcccggggtcttttcgtccttctgcgcttaacgagcatctttactcgtactgcaatttcgccgagctcctggtcgagacagtggggaagtcgttacgccattcgtgcaggtcggaacttacccgacaaggaatttcgctaccttaggatggttatagttaccaccgccgtttaccggggcttgaattcaccgcttcacccgaaggctgacggatcctcttaaccttccggcaccgggcaggcgtcagtgcatatacagcggcttgcgccttcgcatgcacctgtgtttttggtaaacagtcgctaccccctggtctgtgccacccccaaaagctccccgcgcgaggcggttcaccatcgggggtctcccttaaaccgaaggaacgggagtgatttgccgagttccttgaccaggattcgctcgatcgctttggtattctctacctgaccaccagtgtcggtttggggtacgggcggcttcgagcctgacgccgaagcttttctcggcagccgggatcaccggatatcgggccataaggcccccatcatcgcacctcggacccatgcgggacggatttgcctgtcccacgccctgcgtgcttgaccacggaagaccacctccgcggccggctacccttctgcgtcactcctgcgctgacctactacaaggatcggtcccaacaggccagggcatcccgcccccgaaggagcagtaagcccggacccggaggttagtactccaagcctcggttttggcggctgaaagccggtacgggaatatcgacccgttcatccattcgactacgcctgtcggcctcgccttaggacccgactcacccagggacgatgaacgtggccctggaacccttggtcatccagcggacgggatcttcacccgtctctcgctactcatgtctgcattctcactcccatgaagtccacggcgcgttcacacggccgcttcgcccctcatgggacgctctcctacccagtacaaaatactgccgcgtcttcggtggtgtgcttgagccccgctacattgtcggcgcggaaccactagaccagtgagctgttacgcactctttcaagggtggctgcttctgagccaacctcctggctgtctatgcgactccacatcctttcccacttagcacacgcttcgggaccttagacgacggtctgggctgtttccctttcgacgacgaagcttatcccccgccgactcactgccgggatacgcgtcaccggtattcggagtttggttgctgttggtacccgatacgggcccgcaagcatccagtagctctacccccgggacgtaatgacccgacgctgcacccaaatgcatttcggagagaaccagctatcacggaatttgattggcctttcacccctagccccaagtcatccccccggttttcaacccaggtgggttcggtcctccacgcggtcttacccgcgcttcaacctgctcagggctagatcatcccgcttcgggtccaggacacgcgactcaaacgccttttaagactcgccttcgctacgcataccccacacgggttatgctcgccacatgccactgactcgcagactcatttttcgataggcacgccgtcaccccacaaaagggctccgacggattgtaggcgcacggtttcagagactgtttcactcccctcccggggtacttttcacctttccctcacggtactcgttcgctatcggtcagacaggaatattcaggcttacccaacggtctgggcggattcgcacggggttccacgggacccgtgctacttgggagacgcgatcggcagaccatgcgcgttcaggtacggggccctcaccctctgcggcccggtattcaacccggttcccctgacacatggttttctgcaactgccggccggcccgtcggagccggcgcacgcgatcccgcaacaccccgcgcgcaacccccgacgggtatcacacgcgcaaggtttggccatcatccgctttcgctcgccactactcacggaatatcctttcctgcaggtactgagatgtttcacttccctgcgtaccccccggccgaagccggtaccgacccatgacggtcggtgggttcccccattcggaaatcctcggatcaaagccctgttggcggctccccgaggcatatcgcagcctcaaacgtccttcatcggtcctgtctgccaaggcatccaccatacgcccttgcaagcaacacacaccacgaaagtgcatggccgcaagattcctctagcaaattcccagacgacaaatcatcacactaaaaatgatcacaaaacgatcgaaacgaacaatagagttcgattcgaaatcaacagcaaaacaaagattcaaaaaccattgttttgctcgcgtccactatccagttctcaagccaccacgcaccgccacgccatcgcgccggcacacggccggcccccaggcacgacgggcatcgaatcgcgccaggcaaaaagcctggggtggcgatccgggagcccaaaagcgcatccataccaccccggcacccaccgcacgaccggcggggcaaagccaacgacgtcttccacaccagcaaccccgccgccatcgcaccatgcgacgcgcggggcgcacaccgtcggacgaacatccgactgaattctccgtagaaaggaggtgatccagccgcaccttccggtacggctaccttgttacgacttagtcccaatcacgagcctcaccttagacggctccatcccacaaggggttaggccaccggcttcgggtgctgcccactttcatgacttgacgggcggtgtgtacaaggcccgggaacgcattcaccgcgacgttgctgattcgcgattactagcgactccgccttcacgcagtcgagttgcagactgcgatccgaactgagaccggttttcagggatccgctccgcgtcgccgcgtcgcatcccgttgtaccggccattgtagcatgcgtgaagccctggacgtaaggggcatgatgatctgacgtcatccccaccttcctccgagttaaccccggcggtcccccgtgagttcccggcataatccgctggcaacacggggcgagggttgcgctcgttgcgggacttaacccaacatctcacgacacgagctgacgacgaccatgcaccacctgtgaacccgccccgaagggaagccgcatctctacgaccgtcgggaacatgtcaagcccaggtaaggttcttcgcgttgcatcgaattaatccgcatgctccgccgcttgtgcgggcccccgtcaatttctttgagttttagccttgcggccgtactccccaggcgggatgcttaacgcgttagctccgacacggaacccgtggaacgggccccacatccagcatccaccgtttacggcgtggactaccagggtatctaatcctgttcgctccccacgctttcgctcctcagcgtcagtaacggcccagagacctgccttcgccattggtgttcttcccgatatctacacattccaccgttacaccgggaattccagtctcccctaccgcactcaagcccgcccgtacccggcgcggatccaccgttaagcgatggactttcacaccggacgcgacgaaccgcctacgagccctttacgcccaataattccggataacgcttgcaccctacgtattaccgcggctgctggcacgtagttagccggtgcttattcaacgggtaaactcactctcgcttgctccccgataaaagaggtttacaacccgaaggcctccatccctcacgcggcgtcgctgcatcaggcttgcgcccattgtgcaatattccccactgctgcctcccgtaggagtctgggccgtatctcagtcccaatgtggccggtcgccctctcaggccggctacccgtcgaagccacggtgggccgttaccccgccgtcaagctgataggacgcgaccccatcccataccgcgaaagctttcccagaagaccatgcgatcaactggagcatccggcattaccacccgtttccaggagctattccggtgtatggggcaggtcggtcacgcattactcacccgttcgccactctcaccaccaggcaaagcccggtggatcccgttcgacttgcatgtgttaagcacgccgccagcgttcatcctgagccagaatcgaaccctccacaaaaaaacctcatgaaaagcatccgaatagatgactctcaaaacaaaaattgacgagcacgtccttaaggaaggacgccctcaaaaaacctcacccctcatcaaaccctcccgggtacccaaccaccacgacaggcaatcaggcgaggaatgaactggcaatcattgactataaagaagtagtacaaacacgctcttgagttctcaaaccaccaccacaccagcccgaaggccattcccagggggagaacccccgtgctgagcggcaacagatgaataacttacacgcatgtttggattcacgcaaatcgaggcgcgcaaaagcctcaggaatcgttgcaatcacacggttccctcggcgtgtcgcaaacagcctatttgcgctgttctgataccagaataatccgttttgcattgccgctgcgtaacaaattcatgtgttcaccggcgtgttgcaagaattcgattgcgtgaccatccaggttcaccttctcgcaaccggtcatcgcatatgcaaaaagggacttccctttacgggaagtccctttcagtagctattgaagctcgctagcctcaggccagggtgttcgggtcaaccggaacgcccgggttcatcgtggaggtgatggttgccttggtcaggtaacggcccttcacggtggacggcttcagacgcttgacttcgtcggccacagccttgaagttctcgtccagagcggactcatcgaagctcatcttgccgatgaggaagctcaggttgccgttcttgtcgacacggaactcgatcttgccgcccttgatgtccttgacagccttggtgacgtccatggtcacggtgccggtcttggggttcggcatcaggccacgcggaccgagcacacggcccagacggccgaccttgcccatcatgtccggagtagcaaccacggcgtcgaagtcgaggaagccgccctgaacctttgcgatcaggtcgtcatcaccgacgatgtcggcgccagcctcggtagcctcggtggccttcgggccacgggcgaacacgaggaccttggcggtcttaccagtgccgtgaggcaggttgacggtaccacgcacgagctggtcggccttacgcgggtcaacgctcagacggaacacagcctcgacggtctggtcgaagttgtaggagggcatgctcttgagcagagcgatggcctcgttggcggtgtagaggttgttgcgatcgacgcgctcagcggcttcgcggtacttcttggaacgctttaccatctgtccttctccttatcagtccgtaaccgtgatgcccatcgagcgagcggtgccctcgatgatcttcatgccggcctcgatatcgcgagcagacagatcttccatcttgatctcggcgatttcgcgaacctgcgccttggtgacagagccgaccttgtgggtcagcgggttctcggtgcccttctcaacgccagcggccttcttcagcagagctgcagccggcggggtcttgagcacgaaggtgaaggaacgatcttcgtaaacggtgatctcgacagggatgacctgacccatcttgtcctgcgtctgggcattgtatgccttgcagaagtccatgatgttcacgccatgcgaacccagagccgggcccagcggcggggccgggttggccttgccagcctggatctggagcttgatcagcgccgagactttcttcttgggagccatattatggttcttctttctataacgcggttcgaatggtcgccgtcctcaggttcggctgtctgccatcatgctcggtcttgactcattatttatccgtgcatgctgcaggcaatcggcctgtggtcggtctcctcccgcaacttatattgctgtgctgtgctagcgagtctcctctccagacacaagctttcctattatgcaaatccacccggacaacacaaaaagcccgaccacgatggtcgggctctgcaaagtttgggagttaatctagcttctgaacctggtggaagccaagctccaccggcgtatcacggccgaagatggacacgagcacggtgagcttctgagtggtgggctccacgtcggaaacaacggcggccatggtggcgaaaggcccatcggtgacggtgacctgatcgccaacggcataggagacttcgaccttgcgcttcttggcggcggcgggcttgtcgccggcggccttgagtgcctcggaagcaatcatcggagccatcatcgccacgacttccttgcgggagagcggcgccggatccttggtcgggccaacgaagccggtcacgccttcggtctcacgaacgatacggcgggcgttctcatccggccacatacgaatcagcacgtagccaggaacacgcacgcgggtgatgaccttcttgcccttttcggtgtgcttctcgacttcttccatcggcacctcgacctggaagatctggtcttccatgccgaaggaggcgacgcgggactcgatgttggtcttcacgcgcttctcgtagccggagtaggtgtgcagcacgtaccacttgccatcaagggaacgcagggacttggagaattcatcaacggcctgctgaccggcatcggtctcctcggcctgctcggattcgttgacttcttcctcgtcctcatccagagaaacggtctcggtctgagtggaagcaacgggagcggattcagtcgccgccggagcgtcggactcaacatctgcattgtcgacggatgcgtcagattctgcggaaaggtcagcgaccggttcgaccggggcagctgcctcatcggcagcagcttcggaagcctcgacaacaggctcctcagccgggacggcgtcgaggttctcgagattcagttcatcactcatgcgttgttattcaccttaggttgtgcggatcagccgaacacccacagcgtggccttgcctagaccgaagtccatgccagtcacgagggccatcagcagcagcacgaagatgaatacggccagagaccagaagaacagttccttggcggtaggggtcacgaccttgcgaagctcgtcgatgatctgcttgatgaacagaccgatacgcatgaagacattcggcttgactgccttttcactcttgcccgtcttagccattccgtacctcgcgtcagctgcttgattattagaaacttggcagggaaggcgggactcgaacccacaacctacggttttggagaccgttgcgctaccaattgcgccacttccctaggtgaaaatccacctcggcatgcattccgtagagaacgcttcgccacggcgaaaccgccaagtcgttatagtaacggctccggtggattatcgcaaatcgcgtgtcgcgcgcgtggcacgcgactcttctcagttagcccattccttgaatcgacgcatgccttcggctaggtcttcgtcggccagtgcgtaggagaaacgcaggtaaccgggagcgccgaaggcctcgccggggacggcggccacgtgggcctcatccaacagtgcggcggcaaagtcagcggacgtatcggacactgtgcccttgggacccagcggcttgccaagcaaagcggcgatgtccgcaaaagcgtagaacgcgccggtcggagtcgggcagttgacgccctcgatatcgttcaaggcggtcacaatcgcacggcggcgcgcgtcgaaggccttacgcatctcgtgcacctcatccagcgggccggccacagcagccaaagcagcacgctgggagatgttggccacattggaggtcatatgcccctgcagcttggtggcggccttggccacctcaagcggagcgaccatccagccgacacgccagcccggcatcgcataggtcttggccacgccgttcagcaccagcaactgcccgcggcattccggcacggcggcaccgatgtaggtggtgtgcgcatcgtcatagttcaggtgctcgtagatctcgtcggagataacccaaatgtggtgctcgacggcccaacgaccgatcgcttccacggtttccggcttccagacggctccggtcgggttgttcggggagttgacgatgattgccttcgtatgctcggtacgggccgcttccagcgcctcaagcgagggctcgaagttcacgtcggcaccggcgaatacttcgaccggcacaccaccggcaagcttcacagcctcggggtagctggtccagtacggagcgggaatgatgacctcatcgccatcgttgagcaagatctggaaggattcatacacggcctgcttgccgccgttggtcaccacgacctgatcggcattgacctcatagccggaatcgcgcagcatcttagccgcaatcgcttcgcgcagctcgggcaggcccggcgtaggcgtgtacttgtaattcttcgggtcaaggcaggcatctgccgcagccttgaccacgtttgcgggggtcgggaaattcggttcacctgcgccgaagccgacaacgtcaagtccggcggccttcatggccttggccttggaatcgacggcgagcgtagcgctcggtgccacagtgttgatacggtcggaaagagtctgccattgcgccatagtcatggctcccatgctaaacctacagcacgaaaaatcgccagagccgcactatggtgatggaatctgtcgtgtgacagattccatcagtcacacgagcacgagattgtcgcgatgaaccagtgggtgggcgtactgggggccgaggaaacgcttgagttgggcggtgttacgcccgagcatctgcggaatttcttcggaatcgaagccggcgaggcctcgggccaggtgttcaccgctttcggcatcgatccagaccggatcgccggcggaaaaatcgccatgtacttcgagcgcgccggccgccagcagcgaggcacgcccgccgcgaatcgcctggccggcacccgcatcgaccacaatcgtgccgcgcgggtcggcggcgaagccgatccacagacggcgtgaggagccgcgggccttaaccggtgcgaacacggtgcccaccggatcgcccatcatcgcagggcccgcgttcgaggcgcaggtgagtaccgtggggatgcccgagacggccgccacgcgcgcggcctcgagtttggtgaccatgccgccggtgccgaccttggagccggagccggagacttggatgtcgcccagcgcatcaatcacgttgggcacatattccacacggcgggagccgggctgcgagggcggcgcagtgtacagcgcgtccacgtcggtcagtagcaccaaggcttcggcccgcaccaggttggccaccaacgcggagagtcgatcgttgtcgccgaagcgaatctcgttcgaggccaacgaatcgttttcgttgatgatcggcaccacgccgaggtcaagcagacggtccagcgtgcgttccacattgcggtactgggtggcacgaatcgtatcttcggcagtgatcagaatctggccgacgcgaataccgaatcgaccgaacgcagtctcgtagcgggccatcagtagcccttggccgacggctgcggtggcctgctgagtggccacgtccaccggccgcgagtcaaagcccagaggcccgaaaccggcggcgatagcaccggacgagaccagcaccacacgtccgcccatcaatcggacctgagccaaggccgcggccaacgcgtcgagcttgtccgggtcgaggtgaccgctcggctgggtcagcgagctggagccgactttcacgacaatggttccggctgcggcgatcatgcgccgcacctcggcctgactcggagtgctcatttattcctcggtttcaccatcttcgctggactcaccgtggccgaacaggctggtttcgtcatggcgatcgtcgtcaacggtcgggtcggcccagtggccggccttgcgttcggccatcatcgcgtcacgcacggcggcacgggcgtccatcatctcgtggtattgggcacgacgttcggcgttggagcggcggtgcgtgcgcgggtccagctcttcgagacgcagatccttgcctcgggcaccgaggttggagccgtcgagcatttcggcaccagcggagatggtcggatcccaatcgaattcgaccatacgggcaccacgaccgatgcgcacttcgtcgccggggtgagcacccttgcggcgcagctcgtcctccacgcccagcttggccaagcggtcagccaggtagcccacggcctcgtcgttgtcgaagttggtctgcatgacccagcgctccggcttgacgccacgcacctcgaagaacacttcgccattgccgagttcgcggcgctcgaccgtgaactcaagcgcactgccgccctcgtcagcacgacgcggacggcggcccttggtctccaatggcttgatgaccacgcgagcctcctcttcggcctgctcgcggttggccacttcctcacgcatctcgtgcaccagcgcagacaacgcgaagttgagctcctttagaccctcgtgcgaggcagtggagatctcaaagaccttcagcccgagtttctcgaactccggacgcacgaactcagccaattccttggcctcgggcacatcgatcttgttcagaatcacgatgcgcgggcgttcgggaatcgggatggcacccaacggcagctcgagcttgtcggcgtagagcgccaactcgttttccagcgcgtggtagtcggacatcgggtcgcggtccggttcaagcgtggcgcaatcgatcacatgggcgatgatttcggtacgttcgatgtggcgcaggaactccagtcccaggcccttgccttcggaggcgcccggaatcaggcccggcacgtcggcgatggtgtatcgagagtcgccggcgataacgacgccgagattcggcaccagcgtggtgaacgggtagtcggcgatcttcggcttggcggaactcatcgccgcaatcagggacgactttccggccgaggggaaaccgaccaacgccacgtcggcgatggacttcaattccaaaatcacgtcgcgctcttcaccgagttcgccgagcagggcgaagccgggggcgcggcgggtcttgttagccagggcgatgttgccgaggccgccggcaccgccttgggcgacgacgcagcggtcgccctcgtggcgcaggtcggcgagctgcgcgccgggatgcttggctttgccctgttcgccgcgcgcctcaaagacgacggtgccgcagggcacgggcagaatcaggtcctcgcccttggagccgtccttattgtcgcccaaacccatggtgccgctgccggcgacacgatgcggcatgaaacgatagtcgagcaggctggtggcgttacggtcggccacgaacaccacggaaccaccgtcgccgccattgccaccgttcgggccggccaacggcttgtatttctcacgacggatgccggccgaaccgttgcccccatcgccgcccttgacatggacggttactcgatccacaaaatcactcatattgattaccttacaaaaaagccgcgtccttacgggcgcggcttgaaaaaagcttgacgctatatcgctcaggcgatgacgtcgacaaccttgcggtcgcgacgcacaccgaacttcacggagccatcggtgagggcgaacagcgtgtgatccttgcccatgccgacgttgtggcccgggtggaagttggtgccacgctggcgaacgatgatgttgccggccacgacggcttcgccgccgaacttcttcacgccgaggtattgcgggttagaatcgcgaccgttgcgagagctggacgcacccttcttatgtgccatgattcatggtcctttctataactcaggcaatcgccgtgatcttgacgatagtcagcttctggcgatgacccttacggcgagcaacaccagtcttgttcttgtacttctggatgctaatcttcgggcccttggcttcgtcgttcacaacctcagccttgacggacaccttggccagatcggcggcggcaagggtgaccttgtcaccatcgacaacgagggagaccgggaattccacggtatcgcccttcttagcgtcgagacggttcacgaggatgacgtcgccaacctcgaccttttcctgatggccaccggccttcacaatcgcgtacattatcgttccttttatgttttggaaagctaccttgcctaacacgcaccgagcttgcggtcagacaccgagtttcgaatctacaccaccatgcggactaaatcaaatgatttttgcccgcgtgtcaagcacgacacacctgttactcttccgcttactcttccgccgtgttgttggcagcgacggcagcggcggcaatctgagccagtttggctttgacgtcggcgctggaaccagccggttcgggagcgggagcggtgccgcgaccgtgcttgttggttttgacgaacgggtcgccaccgcgaagcgcgtagggatcgtcgtagtcggccgaaacggtcggctgatcatgcaggatgaaaccacggcccttgcaggtcgggcattcctcggagaacgcctcgaccagaccctggccgatgcgcttgcgggtcatctgcaccaaaccgagcgaggtgacttcggccacctgatgcttggtgcggtcgcgtgccaagcattcgaccaagcggcgcagcaccagatcgcggttggcgggcatgaccatatccacatagtcgatcatcaccatgccaccgatatcgcgcaggcgcagctggcgggcgatctcttcagacgcctccaggttgcaacgcgtcaccgtttcttccaaggacttgcccttgccgataaagcggccggtgttcacgtcaatggtggtcatggcttcggtgcgatcgatgacaatcgagccgccggacggcaggtagacctgacgctccatgcccttacgcagctgggagtcgatggaccacttgtcgaacacgtccttgccttcatgctcggccgggtcccacttctccagcttgtccttcaagtcgggggccatggtgtcaaggtattcctcgatacggtcgtagaccttgtcaccttccacgatgagcttgctgaagtcgtcgttgaagatgtcgcgcaccacgcggatggccacgtcgggctcgccctgcaggagcttcgggcgcttgccgtgccagaattcctcgcgcttggcgttgatgcgctcccactggcggaccagtgattcgagatccttgacgatggcgtcttcggatgcgccctcggctgcggtacggatgatcacgcccatgtctttcggggcgatcttggagacgatgttcttcagacggctgcgttcgcgctccgaaagcttgcggctcacgccggtcatgccgccggatggcacgagcaccaggaagcggccggcgagcgtgacctgagaggtcaggcgggcacccttgtggccgatcgggtccttagtgacctgcacgagcaccgggtcgccggacttgaacgccagctcgatgcggcgcggctggccttcgagacgagcggcatcccagttgacctcgccggcgtagagcacgccgttgcgggcctggccgatgtccacaaatgcggcctccatgctgggcagcacgttctgcacgcggccaaggtagatgttgccgacggtctgtacttcctgaatgtcggagacgtaatgttcgaccagaacattgtcttccaccacggaaatctgggtgtgatgttccttctcacgcaccaccatcaggcggtccacgttctcgcggcgtgcgaggaaatcctgttccatgagctggctctggcggctgcgctcacggcggttgtcacggcggcgctgcttcttggcctcgagacgagtggagccctccacatcagtgatctcgtcgatgtactgctgcttgcgggagcggcggaccagcggctgttcgctgttctgactctggtcgtcggtgccctcgccgttcttgccgccacggcggcgacggcgacggcgagtaacggtctgctcctcatcgtcctcatcgcgatcacggtcatgatcatcgcgatcgtcacgacggcgggaacgcgtatcttcggcatcgttctcggcggtatcgtgctcgccgttggcaccggtttcgccgcgtgagccgcgacggcggcgacggcgcgaacgggtgcgggtggcgtcggattcttcgtcgccctcctcttcggcaatcggcgagtaggcgatatcgtccagctcgaggtcttcctcaatctgctcgacttcggcggctgcacggcgctcctgggcgttcaggcggcgggagcgacgagaacggcgagagtcggaagcgtcatcggaatcgaaatcatcatggtccgcgttggcgctggcattggcgtcaccggcggcagcgttgcgggaaacgtcacgagacgcatcacggtcggcggcattgcggccacgatcgtcacggtcgtcacggcggcggctgcgcggctgcgcgtcgtcatcatcgtggctgcgcgagcggcgggagcgacgcgacggacgttcgtcgtcgtcaacatcgtcatcacgagtgtcagcggtatcgtgcgcatccacagcggcgggcagtaccggttcctggaagagcagggacgtcatcggcttgccgcgacgcacggcctcgtggccagagggcagggattcgaccgcgtcgaacaggcgctcatccggggtgtcctcgtgcgtatccgcaactgcacggcgagaacgacggcgaaccggacggtcctcgtcatcatcatccatatccatagacgcacggcgagagcgggagcgaaccggccgatcctcgtagtcatcatcgtcggactggcgggagcgagagcggcggcgaaccgggcggtcctcgtcgtaatcgtcatcgtccacaaccgaacggcggcgggaacgtggggcgtcatcgtcatcgaaatcatcggcactgacagtgcggcgcgaacgacgaggacgatcatcctcgctatccgagtcgaccactgtggaagcggcgcggcgcgtacggcggcgggttgggcgttcggcggaatcctgggaatcgctggattcatcggaatcgctggaatcggctgacttggaatcggccgcagtgccggcatcgggaagcgcgggggcttcgaacagcggggcgcgttcctgcacttgcagttccagagaagcgccggcagcaccggtgccgcggaccacgcggcggccgccacgacgacggcgaacaggttcggcgggctgggaggcggcggcaggcgcagcgttcacggctgcagccgaatcggtattggatacggttgaattatcggttccgtcgttgacgaaaccttcacggttgtcagtgggcacaatgctcctcgcggcgcgctgcatcacgacgcctatttccaggcctatacgcttggctcacaccacgctctcaccgtggccgcgcgaaaacgcgccgcgtaaaggtaacttcgtctcaagtctgtcctgcgggtggcggacaccggcgcttgcgttgtctcattctcgagagccgcaaggggatcgacgccatctcgcacgctgatggttatgcagaaccaccaccctttagtatgccacatattttgtgcgggcgtggcccggcgaggctgacgttctctcagctcccctcccccgcggtgacagctcccctcagggaggggagctagagaggtgtcagaccagccagtcggtaaggattgcggccatgtcggtcaggtcggattcgggcacctgctcgtcgtgcttgtgagccagcagcggatcgccggcaccgaggttgacggccggaataccgagctgagagaagcgtgccacgtcggtccagccgagcttggccagcgggtcgcggccagtgcgctccttaaccagccggaccagatcctgggcgagcggggcgttcaggcccgggcgcgcggaggggctttcgtccttcatttcgatgccgtagccctcgaacacgccgccggtagccacatgctcgccattgccgagttcggcaccggcgtccgcgcccatcatcagagccttggcctcggccaacgacttgtccggggcgaagcggtagttgacgtgcacgcggcattcatccggaatgacgttcgtgcctttgccgccggagatcagcgtggcgttgaggccctcgcgatagtcgagcccgtccacgttcacggtggccggctcgtaggcgttgagtcggttcaggatgtcggccgccttgtggatggcgttctcccccatccatgcacgggcggagtgcgcggccacgccgtgggtcacgacgtcgaagcgaatcgtgccgttgcagccgccctcgatgccgctgttggtgggctcgccgatgatggcgaaatcgccggtgatccaatcgggatgggcctcgacgactttgcgtaggccattcttttcggcgacgacttcctcatggtcgtagaaaacgtaggtgaggtcgactttcggggtggtttccggcgtgcggccgtcgagcgtggcggcgaggtagagcatcaccgcgtcggaggccttcatatcggtggcaccgcggccccacagcacgcggtcttcgggatgagcgtgggcgatttcttcgcgaatcagcgaatcgccgggctccagccactttggcgggaaattgtcgatgaccggcacagtatcgaggtgcccggccaagatcacacggctcggcttgccgaagtcggtgctggccaccactgtgtcgccgtgacggcggacggtcaggtgctcttgctcgttaaggaaggcctcgacctcgtcggtgagggggccctcgtggtcggacacggagaagttctccatgatctgggtgagcaggctgttcagctgctcggcagtggatgcggtgcggttcaattcaagcgtcatgtgaacagcgtaccgcgtgggcggcgggcccagcacactcactacatgagattttgcggccgaatacatttttatgtgccacactggggtggcgaaagggaggattatgccaggtctaatcagcgccatgcaaggcttctgcgttatcggcatcgtaatcgcggtgggatatgttgccgcacgaatgcgaatcggcgggccgtccgctcagatggtgctcaaccggttctccttcttcgtatcgagcccgtgcctgatgttcgcgattctctccaaggagccgattttcgacatcttccacccctcgattatcgtggcgttcttctccgccgtgctggtgggcgtggtgttcttggtgctcaaccgcatgttcttccacctgaacgccccggacgccaccatcggcgccctgaattcgctgtacctcaattccaataacatcggcctgccaatcgccacctacattctgggcaatccggctcttgtggcaccgattctggtcatgcagcaggccatcttcacaccggtgggactgacagtgctggacgtgaccaccaagggcaaggtctccatcaaggaaatcgccaagcagccactgcatcagccgctgcttatcggctcgctgctgggcattgtggtctctgcgatttccgctaaaagcggctggttcccagtgccgaaattcattttcgacccgatcgacatgatcggcgattcggctgtgccaatgatcctgatggcgttcggcatgtccctgcacggcaccaagccgctgcagcagaagggcgatcgcccggccatcctcacggtcgcggtcctcaagaacatcatcatgccaattatcgcgttcctgctcgcctacttcgtgatgggcttccgcggctccgagctgtacgcctgcgtggtactcgccgctctgcccaccggccagaacgtatacaactacgcggcccgctacaacgtgggtctcaccttcgcgcgcgacggcattctgatgagcaccatgaccagcccggtgtttatcgcgatcatcgcggcgctgctgtcgtgatgggtgcgcagagaagcgttctcaatagtatccgtgcgcgcaaatgcacagatatcgcacaaacgaacatttgctcatccgcatatttgcggtgatttcagcgtttccacgttcgatttgcgtatacgaaagtacgcacagttgttattgagaacgattcgctgcgcagctcggctcagtcatcagcccgataatcggccagattcaagctggccgccacatgattggacgcgaacgcgccgatggaaaccagcgcatagcacagcacaagcccgccgaagaagctggccagcgtggccggttcggtcatcgaagcggcgaacagaggggccataagcagcatggaacagccgccggccacaatcaccacgatgttgagcggggtgagtacctcgatgaatcgcgcacggttcaaggtcttgacatcagtgccctccaacaccagcatgcgatattcgccggcctgatcgtacacgctgccggcctgcatcacaccggagctgaccgcggcaagcacagcggcgaacacgagcgtcagaatgccgccggtgccgatgtcgcgaatgaacacggtgaacgggtcgttggcgtcatcgaccacggcggccgatccgaagaatccgcagatcgacgtgatgccggcgataaacacggccaacgcaatgccggacacattgcgccaggcgcgcttagggttgtcgagaatacggcgcatggcaatcatcgtggccgcatccttggggcgcttggccttggccttggcgcgagcggtgatcacccacgtgccgataagattcaccagcgcgaagcacagcagcatgaaaccgatgatcacgccgtacatcaccgcctggccggcctgagccagcatggccgggttcttgaagacgatcatggccaccaccacgactaccacgaacagcaccatacgggtgcctgagggcaatgcggtggcggtgcgcgaggtgacgcccaatggggtgattgccacgcggcgcaaggtgaccagcgacgatatcagcgccaagatggccacgcccgccaaggtgattaccagcgccagcgggccgacccatagctgttcgaaggtgaaccgctgctcctggaagggaatcagcatgactgccggcatcagggcgcaatagccggcaatgccgataagcgcgccgatcagcgcctgtccggcggcgtcaagcgcggtgagacgcaccacctgaccggtggtcgcgccggccagacgcagggcggcgagacgggcgtcgcggcgggatgcggccagtcgtgcggcggaaccggcgagcgccacgaacggcacgacgagcagcatgcaggcgaataccgccaacgccacataggcggtggagaattgggccaggctcgtcgggtcgctgatctgccgtttccacgcggccaccgtatcgggccggcaggcaccgaggtcgaacgcgcaggcgacggtatgatcggccgaagcccgccagatgaaaccgtgtacgccgccgagcacggtgaggaagatggtggtggctgcggcgaaggcgatgattgccagcatcgaggtgtggccggcgctgccgcgcgagccggggcggtgaaacagccgccagagggcgaacgtgctcattgcgcgcctcctgcagtggtttcgctcccgccggcgggagcggagttggggttggcgcctatctggtgcagacggccgtcctgcatcattacggtacggccgcagaacgaagcgacgttggggtcgtgggtgacgacgaccacggcggaaccgttgtcccgcgcggcggccatgagaatgcccatgacctcgcggccggtggcttggtcgagcgcgccggtcggctcgtcggcgaagaccacggcaggtttgacggcgagtgcacgggcgatggcgatgcgctgcatctgtccgccgctcacctcccccggccggtgcgtggcgagcgcgcgcaatcccatgcgttccagccacaggatcgccgtgtcggtggcggtgcggtagggcatgccgtcaagcatcatcggcagggcgatgttttcgaccgccggcagttcgggcagcagctggccggactggaagacgaagccgaagtcgttgcggcgcagtttggtgcgctcggcgtcgctcatgcggctcaggtcggcaccacggaagatgacggtgccggcggtcggcttaatgatgccggcgagcgcgtgcagcaaagtggatttgccggagccggacgggcccatcacggctactgtctcaccctcccggagcgtgaagttcacgtggttcagggcgagcgtgtgcatggtcggcatggcgaagccgggctgggctggctgggatggctggccggcctgaatggcacccggtccggccgcagcgggattcgccgacgcataaccggctcccgtgccggctggtatcacgccggtgacgccgtgcccggcctgtgcgcgggccatgctggcggtgtagtccatgaccaggtcatgggcctcgatgaccggggcccactgctgggtgtgcgatgccggctgctggaactgttggggttgctgagactgctgaggctgagccgccggtcccggcgccggctgaggctgctgcaattgcgatgctgctgtattcatactcccgagcgtacggagcgaacgcccagccgaccatcgggctgcggtatgaacctttctggattaccggcccgctcctcatccgcaaggattagagatacgcaaatgattaatgaccggcaaccactattcggtgccggtcattatgagcattgcattcaggcgctacgcgcattattgcgcggtagccaactcgtccaggcgggcggcgaagcggggccagtcggtcttcatagcggtgaggagcttgcggttgggcacgtcgtcaatcgggacccagcagatttccatgctttcgtcgtcgtttgccttgggctcgacggtgtggccgggcttttcgaaggcaaacacggtggtgtaggcccacgggccgtggtcctcgcggtaggagccgactacctcgatgtcttcgggagtgatgttggcttcctcatagctttcgcgcagcgcgccctcgatgggcgattcgccgtccgcggtggcaccgccgggaataccccacgtgccgccttcggcgctccacgcggcgcgatgttgcatgaccacgtgggtcaccttgccactcaccgggtcgcgacgagccagcagaataccggaagcaccgttggtgccccaatgcttgcggccgcaggcgcagtccacccagccatcgccgggctggtgtacgttttcgaccggcggcagaatgccagcgtgctggttgcccgatgccttgctttccggttccagttcaccacggccgacattccacaggtcagtccacgtgatgcccagttcgccggccagatgccgggccagcggcaggctgaggccgatgataccgtgcggatcgccctcgatgctgtcgatgaacgcgccgccgaagccttccagcgtgaacgatccggcgacttccagcggctcgccggtgacgatgtaccgttcgatgtcgtcatcggtgaattcgccgaaatggactttggcatggcttgcgccgcgcacggtacgtccggtcgcgaaatcgatcaggcagtggccggtccagagttcaccggtcgcgccgctcatgcgcttcagtcgttcgcgggccacggcttcgctgtgcggcttgccgtagcattcgccgtccaggaggaacatcgaatcacagccgagaatcagcgggccgaccgtcgcctcggtcagtcccggctgtccggcaatagcggtggcgatgggttcggtgatggtcggcatgtcgatgccggagaagtcgcgcgtggtggcgacttccgccttggaatagtcgatgggctggccagcggcggctttgcgcaggtcttcgacgacggcttcgcgttccgaatccttgatttccttggccttgagcgggtaggcgatcacgcggtcaccggtcgcagcggcggcagtatcggccacatcacgatacgcacgatgaacggcctcggccttggccgcggccagaatcatcacgcgctgcttgatgctcagatcgtcgacggtgacgccttcttcacgggcggccgcttccagcgcagcaggctcatccacgtgcgagacgcgaattgtggggcagatacccgccgaatacagcacgtcacggcgaggcttggacttggaagcaagaattagcggaatggacatgacttaagtccttatgctcccgctggcgggagccttctcctcgacttagcgacgctcgatttcgacgccggcggtgttgatgggcaggtgaagcacacgccaatggccggaagcaagctgctccgatgcgatctggtcgatggcttcgcgggcgttgccgtaatgcagcacgagcacgcaggggccggcaccggagactgcggcggcatagcccttggagcggaagagcgcaatgagctcggtggacggcggcatcagggcaccgcgatacggctggtgcagtttgtcctgcgtggcggtgaacagcagcgcgttggactgggcctgagcggccgcaagctcgtcagcgaacgccgattcacgggttccgccagcgcaagcgcacgtatcggcatcctgggccggggcagcggcgacgccggacttgccctgctgggcggcctgagccagcaccacgggattcatcgcagcgggcagcagacccacgcgagacacgttgtagacggcgtccttgtatggcagttccctaggcagcgcctgacgggccttctcagtggacagctcatagtcgggcacgaacacggcggcggtgatggacgggtccaccgggtagttgacggcgtggaatccgccgtgcagcggttcaccaccaggaacggcgaccgagccgacgccttctgcggtttcgaagtcccaagagacggtcaggccaccgaatacggccggggccacattgtccgggtgtccttcaatctgggcggccatatcgaagacggccggacggttgaggtcaccggtctgggcgaaggccgcggcggcggcgatgccggccacaatggcctcggcggaagagcccatgccacgagcctgagggatgttgttggtcgcttccagcgtgaagccgagtcggccgaggccgaacgtggcacaggcacggcggaaggtggagaccacgaggtgggtttcgtcgcatgggagggcgtcggcaccctcgccgtggatgatcacgtgggcaatgccgtcgttcgggtcgtcgttgagcgtgaaagtgagctcgtcatggtagtcgagcgccagacccacggtatcgaagccggagccgaggttggcggacgtggcgggcacgcgcacgtgaacgctattgcagattggattcatggttgttccttaaaaaggagctccctcatcagagggagcttgggtattcagctttcaccgttcgaccgcctcatcagagggagcttaggtcttgtcagtccagcacgcgcaggatggacgggtcgccggtgacgaagtcgagcgcctgcacggccttgacggtgttgcgcagggtttcctcgtcggtcaggtgggtcacgacgcgcaactgctgaatctcgccgtcgtagccgggatcggtcatggtgggcttcaggtcctggttcacaccgttgatggagacaccgttcttggcgaactcagcggcgatggcggccagcacgcccggcttgtcgtgaatcaggaagcgcacggcgaatgcagccttggaggcggtaatcggagccttcggcagattcttgtacagcgggatggacgggccggtgcagccagcagcaatgtggcgggcttcggtcaccacgtcgcccacgacggcggaggcggtcggagcgccgccggcgccacggccgtagaacatgaggtcgtcggcggcctcggccttgacgaacacggcgttgaaggagccgtgcacggaggccagcgggtggttctcgtcgatcagggccgggtagacgcgggcggagacgccggcctcgccgttctcgaccacggcgagcagcttgatgaccttgtgttcggcggtggctgcggcgatgtcgtcggcggtgatcttggtgatgccctcaacggacacatcgtcgatggtcacggaggtgtggaagccgagggtggccatgatggcggccttgttggcagcatcgtagccttcgatgtcgccggtcgggtcggcttcggcgtagcccttggcctgggcgtccttgagcacgtcgtcaaactggagacccttggtggtcatctcgtcgaggatgtagttggtggtgccgttgacgatgccgagcatgctggtcaccttgtcgccgaccaaggactcgcgcagcgggcgcaggaacggaatcgcgccacccacagcggcctcgaagtagatgtcgacgcccttggcctcggcggcggagtagatctccgggccgtacttggccagcagcgccttgttggcggtgaccacggaagcaccggattcgatggcggcaagcacgaacttgcgggccacggtggtgccgccgatgagctcgatgacgatgtccgagttggtggccacgctcaaagtatcggtggtgacgatggactggtcgatccacgggaacttctcagtttccttcgggtcgaggcaggcgacgccggtcagttcgaccgggcggccgatacgagcggacagttcgtccttctgctcgacaatcaggcgggcggtctgggagccgacggtgccggcaccaagcaggcctacgcgaatcggggtttcgttgttgcgagccaattcagggtccttccaaaaagttttctatatcccaccgctattttacggattatttccgacagcagaccgaaagtactcatcaaagctgacggtccttttcgtattatgacggatttggccgcacattacagactgtcaggcgctcgcctctgcacgtggatcactcgctgacgtcgaggttgagtaggtcgtctacggtctggcggcggagcatgacgtgcgcaccggactcgctgacagcaaccaccgccggaatcagcgcttggttgtagttgctggccatggtgcggccgtatgcgccggtaaccggcacggcgagaatgtcaccgcgcttcaaatcggcgggcaactgcacctcgtgaaccacgatgtcgccggattcgcagtgcataccgcacacacgggcaagcatcgtttcagcggaaccggtgcgattcgccagacgcgcggtgtagtcggcaccgtagagtgccgggcgaatgttgtcggacatgccgccatccacagacacatacacgcgctcggcaatcgggttgccgtcactgtctttggcatcggacaagtgcacgtgcttgatggtgcccacgcggtacagggttacgccggcgggcgccacgatgtagcggccgggctcgaagctgatggccggggcgggcatgccgagcgcacggttggtgctgttgaccgcatccgccaagcgagtgagttccacgtcaatgtccattgaatcttcgccatcggtgtaggccacggagtagccgccgccgaggtcgatttcgggcaggatgtaggcgtcggtggcccacagggtcttgcgcagcagcatcatgcgcttggccgcgtgaatgaaggcgtccgcatcgtggatgttggagccgatgtgcgagtgggctccgaccagttcgagtacgtcctggttggcgaggatggtcttgagcacggcgatggacggaccgtccgcaatggcttccatcgcggcggccagcgccttgtctgtgtcggagacttcctcgtggctcaggtcgtacgggtacttgacgtcgtagtgcagctcgcgctctgatttctcggtcttttccgcgccattttccggggaatgcgtcgcagagatacgcgcgttggtagcggcaggcgtcacgtctttgaggtcgttcagcacgtcgagcacggcggcgtcggccccggcggccagcagcggcacgccgaacttctggtcctcgtgagcagtggagatgtactcgtggccgccggcgtggacaccgacggtgacgcgcagcatcacacgggcgcgtttgccgagcttgcgggcgatggcagcaacgcgctccggctcgtcgggctcgtcgatcacgattttggcgaagccctgttcgatggccagcgcgatttcctcatcggacttgttgttgccgtgcagcaccagacgacgtccgggaacgccagcggcgagggcgattttcatctcgcccatcgtgcaagtgtccacaaacatgccggcctcggtgaccaatcgcacgacttctttggacaagaacgccttgccggcaaagctcacgtgcgtagtggaggtgttgaatgcttcggcggcagcgcgcacgaagtgcctagcacgtgcgactacttcatcagtgtcgatgagatagagcggcgagccgaactcgtcaagcagcgattcggcggtacgaccatgaaattcgatggagccttcggcattcacagccgtagcggccggccaaattggagaaataggcataatcacatcttttcgggggcggtgacgccgaggaggtcgaggccgttggcgatgacctgctggacggcgtcattgagcttcaggcgggcggcggcacgggccgactccgggttcttggcaatctccaaggccttgcgagcctcgtcgtcgccacgggtttccggatcggtcagggccatcggcaccacgcgctctacgttgtaccacttgtgataggtggcggccagttcttcgaggtaacgggccaccttgtgcggctggcggtcgtcggccgcagtggcgagcacgctcgggaattgggcgagggcggcgagcacttcgccgtcggcctcggtgtcgagcagggccaggtcggcaccctcgtagctgatgccggcagcggctgcgttgcggtccacgttcttggagcgggcgtgcgcgtactgcacgtagtacaccgggttgtcgttggtgtgcgaggcgagcagggccaagtcgatgtcgaagttctggttgtaatcggagcgggccagcgagtagcgggcggcgtccacgccgaccacggagaccaggtcgtcgatggtcacgacgttgccggcgcgcttggacatgcgcacgggcttgccgtccttcatcacgttgaccagctggccgatgagaatctgcatgttcttgccgggctcatcgccgaaggccgcgcacatggccatcatgcggccgatgtagccgtggtggtccgcgccaagcatgtagatggccacgtcggccgagttttcggcgcgatggcgcttgtcccagtagtaggcgatgtcggcggcgaagtaggcgaactcaccattggacttgatgatcacacggtccttgtcgtcgccgtgcttggtggattcaaaccaagtggcgccgtccttgtcgaagatgtcgccgcgggacttgagctcttcgatggcggcgtcgaccttgccgtcggcgtacaggctgttttcatggaaccagacgtcgaagttcacgcggaagtccttcatggacttctgaatctcgtcgaacatcatcggtacggcgcgcttgcggaattcctcgcgcacttcggtatcggcctcgccgagcggttcaccgtcatcgttcaggccctgatcctggtgggccagtgcggtcaggtccacgccgtcggactcggcttcggcctgaacacgggcggcgatctcgttgatgtaggcacccttgtagccgtcgcacggggtttcggtctggtagccggcctcacccaagttattggcctcggcccaagcggcgaccagcgacttggcgaagcggttgatctgctcgccgtggtcgttgaagtagtattcgcgcaccaccttggcgccgttggcctcgagcacgcgggccatggcatcgccgacggcagcccaacgggtgccgccgatgtgaatcggaccggtggggttggcggagacgaactcgagattcagggtctggccgcccagatggtcgttgcggccgtattcgttgaccttgttgagatgcttgtcggcgtcggtcacggcaccggcggcgagtacggtgtccaccacggcggcggccgaggcggagtcaagcgtgatgttgatgaagccggggcctgccacctcgaccttggcaatgccgtcggcttcagcgagcgcggcggcgaacggctcggccagatcgcgcggcttcatgccggccttcttggccagctgcatggcgatgttggaggcccagtcgccatgcgcacggtccttcgggcgcatcacggcgagcttgtcgacgggcggaatcagctcgtcggtcaacgcgccggcctggccggcggcgacgaggttgtgggcaatgctggaaatcagttcacttaaggcttcaggactcattcttctaaggatactgagaacggcgacacttgcgccctggtatgcctatatgctgcccctgctggcgggggcaagcacacagccgaaagataccaagcgaaaaagggtaggcgacaatcgccggaatcgttggaggctcgccgaaaccgctatacataccgtcggtcggtatctatagtgatctgcaacatcaagcacagtagggaggccaccatggcacgtaacgctcaccccgaggtgacgcgcacccgcatcctcgacgccgcacaacggctgttcatggcccagggctatgagcacacctccatccagaacatcgtggacgagctcggcgacctctccaaaggcgcgatctaccatcacttcaaatccaaggaagccatcctcgaagagctcaccaaccgagacaacaatatgcaggacgacttcaacgaatccgtcatgaatcgcactgaccttaccgccctcgaaaagttccgcgtgctatggcggcattcgatgaccaagcaagaccacgtgcagatcatgcgagccgccatgccgatgctgagcgatccggtttcgttcgccgcgaatatgcaggtatggagcaagcatctgcccgaacgcttcctgccgctgatcgaggcgggcgtcaaggatggctccatccccaccgagtatccgcgcgaggccgcagagctgctttcgttgctgccgaattattggctgatgccgtatttctacccggtgaccctgcccgaaatggagcatcgcatccgctgcttggccaccatgctcgacgcgatcggcgtgccgattttcgatgacgagctcatcacggtcgccgcgaagggcatgatgacgttcgcaggggagccggagaaaggctcagaatgaatagcacagtgaaacccgagaatgacatcgccggcaccgccacccaacgcccgctgctgtcccgcgacttcgtgctgctggtcgccggacaaggcatctcgctgttcggcaatgtgatgctgcgattcgcgatgtcgatgtgggtgctggacgaaaccggctcagccaccatcttcgcctcggtgctggccatctccatcgtgccgaccatcctgctctccccgttcggaggcgtgctggccgatcgcgtcaaccgccgcaccatcatggtggcgctcgacgccatctccgccgtgctcgtgctggcgagcgccatcgtcttcgccaccacgggcttccatatcgtagccatcgccaccatgcaggtgctgctcgccgtgctcggcgccttcgaaaccccgaccgtgcagaccgcactcccccagatgttccggcagtacggcccggccaccatgcgccaaggcatggccgtgatcaatcaggtccaacaactaagcagtctgctgccgagcttcctcggcggcgtgctgtatgcgatgttcggcatccgtctcatgatgatcatcgccatcgcaagcttcgccggcgcagccgcgctcgaatgcttcatccgcctcagtgccccggatcgcggcgacgaggagctgcccaccccacttgaagacctcaaggcaggcgtgcgattcctcatcaaggaccggccgaacgtgttcagactgctgttgttcgcggcggcgctcaactttgtgcttatcggctattccggcgtcggcttcccgtacacgattcgtacagtgctcggcttcgacgccactgtctacggcatcgccgacggcctgatcggtgtttccggcgtggcgggcgcattcatcgccggcctgttcgccgccaagctcacgatgcgctggctgccggggctgatggcgacgcttacgctggccatggtcccacagggtattgtgttcctgctgccggtcgacgcatggaccaaactcgtggtgctgatcgtattcacctgcggcacgatggtcgccagttgcttcacgaatctcatcgccgtgcccgccatccagctcagtacgcccgaggcaatggccggcaaagtgatgtccatggccgcggccgtgagcatgtgtgcccagccgctcggccagatggtgtacggctgggcctacgaccaaatgccggtcgccatcgtgctgttcatcaccaccgccctgttcgccgtgctcaccgtgctgatggttccgctcgccaagcagttcgaggactgacgatcggcgcgcacgccacatcctgccgcccggccataattgaatcaccgcacgaaaaggcacgaaaaggcacgaaagaggtacctatggccacgctcaacccccaatcattggtcacgttgtggcaaatcgaacagtatggttcgttctccgccacggccaaggccacgggttggtcgcagccggccatcagccagcagatcaaaaagctggaggcacagtgcggttcgactctggtgcaacgcacctcgcatggcgtggaactcaccgccaccggttcgatgctcgcccgccacggcgaggccatcgccgatcggctggagcgggcggcccgtgaagtcgaggattatcggcatcatcggtttgatcacctgcatttggtggccccaccgtcaatctgctctactatcgcggcccgtaccgtggtcaagctcagtatgttcacggacatcgagctgagcctgattcagatggagccgccggaggcgatcggtctgatttcccaaggcaaggccgatgccgccgccgtgttccggtacagcagcatcccgaacttcctgcacatcggcgacgatctgaccttccagtcgctgggttacgatccgatgcgattgttggtccgccgctccagcgacatcgccaaacgattcgaggagaccggcgaacccgtgccgctgtccgccgccaaagacgagcattggatcgccggctgccccacctgccgcgcaaatttggtgaaactggccacccgtgccggattcaagccggatatccgccactgcacggatgattactgggccacgcagaacctggtcgaggttggcatgggcgtctcgctggtgccggcgctcgatacacatatcaatctgcaaggcgatctggtggcctgtcccatcgccgacgattttgcggcgcgcgaggtcggcatcgtgactcgtgccggcgaccatcgtcccgcgctcggttcattgctcgaagagctcgagcgcacgtcactcaaatatttgagtgccaagtagtcggacagcgataagcaagcttgcgaacgccatcacgatttcggggagccagaccgttgagcagcccttctgtaccaggaacaatgacatgttatgagcatgaacaacattccccagtcaacgactgtgagcaacgcaaccgccgacgtctcttgctttgatgccaatcacatcgacgtgacgaccatcgaggatctgaagcaggtcggttcggataaatggacccgctaccccggctgcatcggcgcattcatcgccgagatggattacggtctggcaccatgcgtggccgaagccatcgaagaggccaccgaacgtggcgcgctcggctacattcccgacccgtggaagaaggaggtcgcccgctcgtgcgccgcatggcagcgccgctacggctgggatgtggatccgacgtgcatccgcccggtgccggacgtgctggaggcgttcgaagtgttcctgcgcgagatcgtgcgcgccggcaactccatcgtggtaccgactccggcctatatgccgttcctgagcgtgccgcgtctgtatggcgtggaggtccttgagattccgatgctgtgcgcgggcgccagcgagagcagcgggcgcaatgatgaatggctgttcgatttcgacgccattgagcaggcgttcgcgaacggctgccatgccttcgtgctgtgcaacccgcacaacccgatcggcaaggtattgacgcgcgaggaaatgctgcgattgtccgatctggccgccaagtacaacgtgcgtatattctccgatgagattcacgcgccgttcgtctaccaaggccacacgcatgtgccattcgcctcaatcaaccggcagacggccatgcaggctttcacctccacttcagcctcgaagtcgttcaacattcccggcaccaagtgcgcgcaggtgattctcaccaatccggacgatctggaactatggatgaggaacgcggaatggtccgagcaccagacggccaccatcggtgccatagccaccactgcggcctatgacggcggcgcggcatggttcgagggcgtgatggcatatatcgagcgcaatatcgcgctggtcaacgagcagatgcgcacgagattcgccaaggtgcgctatgtggagccgcagggcacgtatatcgcgtggctggatttctcgccactgggcatcggcgacccggccaactatttctttaagaaggccaacgtggcgttgacagacggccgtgaatgcggcgaggtcgggcgcggttgcgtgcgtatgaacttcgccatgccctacccgctactggaggaatgcttcgaccgcatggccgccgcacttgaggcggacgggttgttgtagaacagaattgcggctcccctcaaagaggggagccgaggaacggccgaattagtcgaagtcggcaccgagggcttcgagtttgccgcggaagtcggcatagcctcggtcgatcaggctgatgccgtgcacgtccgaggggcctgacgcggccaaggccgcgatcagatggctgaacccaccacgcaggtccggcacgtcaatgtcgcgtccggtcagcggggtcggtccgaagatcacggcggaatgcttgtagttgcgctgccggaaacggcacggcagcgagcccaggcactcgcgatacaactggatggtggcacccatctcgaccagcggcttggtgaaaccgaaacggttctcgtacacggtctcgtgcacgatcgacaggccgttggcctgggtcagggccaccacgagcggctgctgccagtcggtcatgaacccgggatgcacgtccgtctcgatcgccacgggcttcaagtccccgcccggatgccagaaacggatacccttgtccgtcacctcgaatttgccgcccaccttgcggaacacgttcaggaacgtgatcatctccggctgggtcgcgcccttgacgaagatgtcgccgtgcgtggccagcgcggccgacgcccaggacgccgcctcgatgcgatccgtcagcgacgtgtgcgtgtacccctgcagttccttgacaccctcgatgcggaaggtgcgatcaacgtccacagaaatgattgcgcccatcttctgcagcacgcacaccagatccatgatctccggctcagtggccgcgcccgacagttcggtcttgccctcggccagcacggccgccagtaaagtctgctcggtggcgcccaccgacgggtagggcaggtggatcttcgcgccgtgcaggccgttgggcgcggtgatgtggatgccgtccttgtgttccttgttcaccgtggcgcccagcttgcgcagcgtctccagatggaagtcaatcggacgtccgccaatcgcgcagccgcccaacgcgggaatgaacgcttcacccaaacggtgcacgagcgggccggaaaacaggatcgggatgcgcgacgaaccggacagtgtatccacgtcggccacatcggccagctgcacacgcgaggcgtcgatggtcacaatgccgttcgcaccgtccacatccacgtccacgccgtgcagacgtagcaaatcggacaccacatgcacgtcacgaatctccggcacgttcttcagcaccgacttgcccggtgccagcaacgcggcgaccatcgccttgctcacgaagttcttcgcgccacgcaccttgatcgtgccattcaaaggcttgccgccctcgacatgcaacacgtcatccggattctcagccacgccactctcctcaatcaatcaagattcaaaaaatgctaccgtccagtttgccataagccatgtgccgactccgtgaaatgcaccccagccgaactttgatcaccgtgcacaacggatcccataccccccgtcgaatcaaaccgataacgtgatcttcctcacatttgccgccacggcgttctccatacttctacgctacgattcagggcaatggcatcagacgccatgtccacaagcaaaggagcattcatgaccacagtcgccgtcatcggctgcacgcacgccggcacgttcgccaccacctcgattctcgccgagcaccccgattggaccgtccatgttttcgagcgcaacggtacgctgtccttcctctcctgcggcatcgccctgtgggtgggcgaccacgtatccgacccgaagaaaatgttctactcctcccctgccgctctggccgaagccggcgcgaccatgcatatgcgcaccgacgtgacgtccgtggacctcgacgccagaaccctcacctaccgcgcgctggacgaggccggagaccccgccgaacagaccctcgctttcgacaaactggtcgtgaccaccggctcgcgcccggtcatcccgccgatccccggcatcgacagcccgcatgtgctgctgtgcaagaactgggatcacgccatcgccatcaaggaaaaggcgaaaaccgccaagtcggcagtggtgatcgggtcgggctatatcggcgcggaaatcgccgagcagttcagcgtcaccggcgtcaagaccacgctggtcgacggccttgatcgcccgctggccaataatttcgataagaccatcaccgatcaggtggcggccgcgttcgaggagcacggcgtcacgctcgcgctcggccagaaggtggtcgagttccgcgacaatgacgacgacaccgtcactgtggtcaccgaaaagggcgagtacacggccgaaatggcgattctggccgtcggcttcctgccgaacaccgacctgctcaagggcaaggtggacatgctgccgaacggcgcgatcgtggtcgacgactacatgcaggcgtccgcgccgggcgtgtacgccgccggcgactccgccaccgtgttctacaaccccaccggtcagcacgattacattccgctggccaccaacgcggtgcgccagggcctgctggtgggccgcaacatcgagacgccgaccgtgaagtacatgggcacgcaggccacgtccgccgtacagctgtacgatctctcgctcgccgcctccggcctgacccgcgccggtgccgaacgccgcgggctcacggtccgcgagacctcgctcaccgaggattatcgcccggacttcatgctcaccaccaccccagtcacgtcgattctgacctgggacccggaaacccgcaaggtcaagggcggccagttctgttccaaggccgatatctccggcgcggcaaacgtgatttccatggcgattcaggccggcttcaccatcgaccagctcgccaacgtggacttcctgttccagccgaacttcgacaagccggtctactacgtcggcgccgtggccatgaaggcggcggccgagtaagacggctgtacccaccgcaaaaagaaaccccggcgtgatgggcgccggggagagaaaggagagaagaagaagaaagaggttaagttatgcagcttgttcggccgtgattacatataacaacaccagtttcaatgcaacgtgggcactggctgggaattgtctgggaatcacggcccgtacaggctgtttcttgttttggagccgatttaccggctcgccttgatcttgtgggccagctcggcgtcccacatcgcgccggttgcggacatcaccgaatccgcgccggcgtttctgtatgcctgatagtcggccggcgaaaccacgccgcccacgccattgatcttgaaatcaagaccgagcttctcgcggatcgcggccagacgggcgaccatgtcgaggccggcaccacgaatcgcattgccacacacgccggagcgatcacggcctgcaccgggcagggcctgattgccattggcatcgaccagtttggcggaaatcgtattgatggtgctgaatccctgcacagtgccgtggcccacggtggaacgcaccatgagttcaaggtcgccgtcgctggggatgtaggcgagcttgaccatcagcgggatgtcgccgatctcctgcttcacggcctcggtgatgcggcccacgagcagcggattgtggcatagcaggcggttgtggccctcgttggggcagctggtgttcatcaccatgagcttggcaccggtttctttgaccaggcgggcggtggtggcatggtcggcgatgtattcctcctcgctcatgccctccacacgcgagccttggaagctcgggaccagcacttgaccgggaccggcggcctcgatggcggcgcgcatgtccggctgccagacgtcagggctctgcgagggcacaccgaagctgttggagatggaaatcggctgttcatagttggtgtcggccagcacgccttcgtccagttcggcgctgcccggcgtcagtgaaccgtccgccgacttggggtgtacggcgagcacgttcgggaacgggttgcagccccaggcgcgcgaacgcacggttttgtaggtcgccagatcgaaacccatgtggaaagcggccgtggtgaaacggctgttgagcagcgggcctgcgggaatgccgaaaggcagattgaccggctggcccaggaaggaggccgaggcaccctcgctggtggttccggcggcatcggcaccgttgccatccttcagcgcctcggcgaacgcgccgaacggcccttgctcatagttgtcttcgtagctgcggctgacgtcgtaaaacggctcaaaatcactcatgcttcaacgataagccaacctacatgcgtacacgcacactcaacccaccatcgcgccgtcaaacgaaataagagccaacggccctgggcctgcaattatggactcgcctttcgtcgaggctcaatgctggcctcgctgctgtcgcagctcggcacagggcctgctgaaagcccaccgggctttcagcaggccgatcgcggctaaataatgccgcgatcggccaacggccctgtccagtctgcgtcctccggctcgcgggcggactcgattttttcttcgggccagtgcttggcgggaatggtcttgggcttgaaggggaacttttcggcgcgcatcttttcgtaggcggcgatgtagtcctcgtgctgcagcgtcagatcgatgtcgtcgtagccgttcatcagacgccaacgcacgtaatcgttcacctcgaacggcagggtcacgtcaccgcaagtgacggtgcgagtctccagcgagacagtcatctcgcgaccaggctcttcctccagcagcttccacaggagctcgacggactcctgcggcataatcgcggccagcacgccgtttttggcggtgttgccgtagaagatgtcggcgaagctcggcgcgatgaccacgcggaaaccgtaatcgtgcagcgcccacacggcgtgctcgcgggaggagccgatgccgaattcggggccggcgaccagaatctggcccttaccggcgtattccggcttgttgagcacgaagttcgggtctcggcgccatgcgtagaacagggcgtcatcgaagccggacttggtcacgcgcttcaagaacacagcgggaatgatttggtcggtatcgacgttggagcggcgcagcggcacgcccacgccggtcagtgtggtgagtttttccataacaattttcctttcggggatctctcccccagtcagtcttcgactgacagccccctcgtcagagggggctcatgcgtattgactcagagatcggcgggggacgagattgtgccgcggatggcggtggcggcggctacggccggcgacgccaaatgcgtgcgcgagcccttgccctggcggccctcgaagttacggttcgaagtggaaatcgagcgctcgttcggtaccagcttgtccgggttcatgcccaggcacatcgagcagccggcattacgccattcggcaccaaagtccttgaacaccttatcgaggccttccttctccgcctgcagacgcacacgggaggaggccggcaccacgagcacgcggtgaatgttctcggccttgtggtgacccttcatgatcgcggcggcctggcgcaaatcgtcgatacgaccgttggtgcacgaaccaatgaacacggtgtccacggcgatgtccttgatcggcatgcccggcttcaaacccatgtatgtaatcgcacgttcggcggcggcacgcttggtggcgtcggcgatcttgtccggctccggcacggaggcggtgatcggcagaccttggccggggttggtgccccacgtcacatatggaccgagcttggtggcgtcaatatccaccaccttgtcgaatacggcatcgtcatcggtcttcagcgtcttccagtacgccacggcctgatcccacagctcgccttccggcgcgtgcggacggcccttcaggtactcgaacgtggtctcgtccggcgcgatcatgccggcacgcgcaccggcctcgatggacatattgcacacggtcatacgttcgtccatggtgaggttgcgaatcgcctcgccacggtattcgatcacgtaaccctggccgccgccggtgccgatcttggcgatgatcgccagaatgatgtccttggccgtcgcgtccgcgggcagcttgccgttgacgttgacggccatggtcttgaacggcttcagagacagcgtctgtgtggccatcacgtgttcgacttcggaagtgccgatgccgaacgccagcgcgccgaacgcgccgtgcgtcgacgtatgcgaatcaccgcacacgatggtcatgcccggctgggtcaggcccagaatcggggcgaacgcgtggacgatgccctgatcggcgtcgcccagcgggtgcaggcgcacgccgaactccttgcagttcttctccaaagtcgtcaactgcaacgcgctcgtctcatccgggttcgggcgatcgatatcaacggtcggcgtgttgtgatcctcggtggcaatgagctgatccacgtgacgcggcttgcggccggccaagcgcaggccctcaaacgcctgcgggctggtgacctcatgcatgagcatcagatcgatgtacagcaaatcaggggctccgtcgctgcccttgcgcaccagatgatcggcccagaccttctcggccagtgtcgttcccatagtgattcctccaaaaaattccgcgcgaggtattgtgttcgcgccttgttcgtggtattagcctatgtgcttgcgatgggcccggccatgagcatgccggatattgagatacggtcaaatgatggcctcaatatgactcggacccgactcgaacatgacctagtcatgactcggttccgctccagacatgtctcttcggcatccacgaacgccctttcaacttcatggccaccctgtgagacacttccccgatttgccatttcactatgtgagatggcataatcgcccttattatgactgattcccgggaagaaccattgaacaacagcttgaccaagtccgagccggttgaagacaccaccgccaaggacgatggggaaatccattccggcgttggcgtccttgataaaactgtaaagattcttgacgcactggaatccggcccgtctacgctgggccagcttgtggccgccaccggtctcgctcgaccgaccgcacatcgtttggctattgcactggaacgccaccgtttcgtactgcgcgaccagcatggccgattcgtactcggctcccgtttcgccgaacttgccgccgcagcaggcgaggatcgtctgctgaccgccgccggcccgatcctgcagaccctgctcgatcgcactggcgagtctgcgcagatttaccgccgccaaggcgatcagcgcgtgtgcatcgccgctgtggaacgcacctccggcctacgtgattccattccggtgggtgccatgctgtcgatggaagccggttccgccgcccagattcttctggcttgggaggattccgaccgtctgcaccagggattgcgccacgccaagttcaccgccaccaagctggccgccgtacgcaagcgcggctggtccgagtccgtgaacgaacgcgaagagggcgtgtgctcgatttccgccccgatccgcaacgcctccggccaggtcatcgccgccatctcgatttccggcccgaccggccgcatgggtgccgcccccggacgccgctatgcgccgctggtgatggccgccggcaagtacctcaccgaggcactggtcaaagccgttcgctgaaacataccagtcaatccaaccgatagcccaaccggcagaaatcccgcgtcacaacgaaagagacgcgggatttctgccactaatcgtccaacacagcggaaggccaccgaaacctcgaatacttcgcgccgctttccgcctctatcaggaacagttcctgtaaaccgggttacctgaataaaccggacagttgactccatagcgacggcttgcgcagcaaatcatcgccctcgccctcgccaggcgcggtctggttcaccgcataggtataggcgcgtttggaactgggcttgcccaccagttcgccaaactccagcaattgcgtacgcggctcgtaagggtgacggatatcaaattcgatcaatcgcgtggcgcgtttggccggagccggtccgtacgtattgaatccgcaggttggcgtagcgataagcaacagaccctcatgttcgccgacgaaaccgttgcgatgatcatgaccagctacgacgccgaaatacccctcgcgcagcaattcgaattcgtctgacgtatcagggcaggatatgccttctcccaaatatccgccgggctgggtttgcaattcgtccagcacgtagtaggtatcggcgtgcgaacgatagccctgcatggcaaacgccgcgttggccgccaccggcttcagcacgttgtaatactcgggcatcggcatgtgctggaacaccattgatttcgcaccgatacggtcgggcacggcgttcaggaaggcgagcgctgcgggcgatggtgtgccgaagccgccgccatgcacgtaatcgccggagtcaagaatgaccagacccagcacattgcgcgtatggtcaacgtccataaccggcagcgcgaaggtgcctggttcaccggaaccagtggcaccagacagcgtctgcacagcaccacccgctccacaggtgtatgcaatctggttcggcaaggtctcactcggcggattgacacaaccggggaactcgcgatagataccgtccagttccgcattgcttagcccgcattggaaatcatggttgccgtacgtcacggcccacggaatgccgcgcgccgccaacggctcagtgaactggccaatggccttgcgcaccagcgctcgggtatggttcagcgcggattcggcaataggttcgttacaccagcgacgtttacggaatgaatcggcgaacgccggatcgtagccggcgatctggttgccggagaaaaacaccagatcaggccgtgtggcatcaaggctggcctcaatcagggcgatggtgtctttggagactttcggcccatcctgaatgtcggcaatctgcagcacgcggaacttgccggaatagtggaattgcagtcgtccgagacgcgcagagatagagaccgggcggccgtcttcggcatcggccggcttgatacggggtttcgacgacatcccctctggcgtacgctgtgtttccgtcatgccctccactgtacacacaaacgaaaaggcccgccggagcgggccttttctacaagttcaactactggagcaaaatctctgcacaacatcatcgtcgtaacggtaagtctttccaatgcccgtccaacgtaacagtcctcgtgaccatacactatttgtgggctctgctctgttcagttgttcttgtacctcataatctattcatcattcccgtttctcgcaacctgcagagagtcgttgtgcgttttttatcacaactgttcaatcgcactttctgactatcggaaaacgagctgaactgttcacatcgaacccgtctgatgttcggtttcgttcgtttcaccgccgctcacggcgtgtcgcgagcgacgctagcacactcaaaaccaaccaacaccgaactaacatgaacacccgttgaattctggcgcgttcagtcgttttccggccacgccaaagcttacgatataagctatggcacagatatttgacgcaccctcgaaggcaattctgcgcagccaaatcgcagagcatattgccgaaaacgacaacaacgaccgccgcgtcgatcaggaaggcgaggcaccgctgcccaaggaccgtttcttcgaccgcgagctcagctggctcaagttcaaccagcgcgtgctcgaatgtgcggagaacgaagacatgcccctgctcgagcgcgccaacttcgccgcgatcttcgcctcgaaccttgacgagttcttcatggtccgcgtcgccggcctgaagcgccgtatcgactcgggcatcgccgtgccatctgccgccggcctgagcccgcgtcagcagctgcgcgcgatcagcgagaccgcacaccgtctgcaagacgagcacgcacattacacgatcgacaccattctgccggaattggagaaggagcgcatcgtcctgctgacgtgggacaagctcacatcctccgagcaggagcgcctctcgcgctactaccgccagcaggtgttcccggtcctgacgccgctcgccgtggatccggcccacccgttcccctacatttccggcggttccatcaacctggccgtgattgtggagaacccggcctccggcaagtcgcacttcgcccgcgtcaagatcccgggcaacctgccgcgcctggtgccggtggacgacatgaccgatgaggagtccaaggacgagcgttacggcttcatcgccatggaaaagctcatcgccgcgcatctggaatccctgttcccgggcatgatcatcaaggaggcccgctccttccgcgtgactcgtaacgaggacatcgacgtggaagaggatgacgccgaaaacctgctcaacgccatggagaaggagctgctgcgccgccgcttcggaccgccgatccgcctggagatcacggacaccactagcccgttcctctcccagctgctcgccgaccagctcggcgtgagccaggacgaggtataccgtctgcccagcccgctggacctgaccgtgctctttgagctcggcagcgtggaccgcccggacctgaagaaccgtccgttcgtgccgaccacgaaccgtcagatcgccgaggtcgagtcctcccgtgcgcaggacattttcgccgccatccgcgagcgcgacatcctgctgcatcacccctatgactccttctccacttccgtgcaggccttccttgcgcaggccgccgcggacccgaaggtgctggccatcaagcagaccctgtaccgcaccagctccaactcgccgatcatcgacgccctgatcgacgccgctcatgccggcaagcaggtgctggctttggtggaaatcaaggctcgtttcgacgaggacgccaacatcgcgtgggcccgcaagctcgaacgcgccggcgtgcacgtggtgtacggcatcgtgggcttgaagacccactgcaagctcatcgaggtcgtgcgtcaggaagcggacggtctacgccgctactgccacgtaggcaccggtaactacaacccgaagaccgcgcgactgtacaccgatctgggtctgctgacctgcgacccggtggtcggccaggatctgactcgtctgttcaaccagctctccggttacgcgccgaagtccagcttccaccgtctgctggtggccccgcgcaccgtgcgcaccggtctaatccagcgcatccgccgcgaggaggacgccgcccgcgctggcaaggaggcctggatcaagatcaaggtcaactccatcgtggacgagaagaccatcgacgccttgtaccgtgcctctcaggccggcgtgaagatcgacatcgtcgaacgcggcatctgcgctctgaagcccggcgttcccggcctgtccgagaacatccgcgtgcgttcgattctcggccgcttcctggagcactcccgcatctacgccttctgcaacgcggacggcccgcagatcggcgagggtccggcttccggcccggaggtctacatcggttcggctgacctcatgcaccgtaaccttgatcgccgcgtcgaggctctggtgcgcgtcaccgccccggagcagattgacgagctcatcaagtacgtggacctgcagatggccgactccaccatgagctggcacatgcagcccgacggcacgtatgtgctgcacaccaaggacgacgagggccgcccgctggtcgatagtcaggaatacctgattcgcaagcaccagcgtcgccccaattcacacaactgatttcactcgatgctccctgtcagcgcaagctaactgagggtggttacgatgcccggcttctctttcgagaggatgccgggcatcgttgttcagcgcgcaaaaactacgtagcagcggtccaacgtgacctacaatacaagagatgggtacgaacagtatgagacgaatcgtggaagccgccggcggtattttgtaccggtggaaggatgatgccgagccgacgcaggcatcgtctccatcagcgaaatccaatattgccaccgatggcaccatcatcgcgaataccgcggattctgacggcaaggccacggcagcacacggcgcatcggacgcggctcccaccccggacccggcgcaggccgacagcccggccgcggcggacaacgtactcaaccgcatcgaactgtgcgtcgtgcatcgcccgaaatacgacgactggagctggccgaaaggcaaggtcgacccgaacgaatcgcaccggcatgccgccgtacgcgagatcggcgaggaatcgggcctgtccgtggaacttggcccctatctgggcgacatcgagtacccgctgtccgaagaaggcagcaaacagcgccataccaaggatcggtcggcggataccaagcatatccagttctggatggccacgccgatcagcgccatcgacaacctgcggcgtacccatgcgtttggcccggtgcatcgggcggacatcggcgaaatcgacgaagttttgtggctgacgccggccgaggcccgcaagaagctcagccattccaccgataaggacatcctcgcgctattcgttgatcgggtgcaggagggcgcgcttgacgcggtgccggtgattatcgtgcgccacggcaaagcggaagcgcgcaagctgtggaagggttcggacgcgaaccgtccgatcacgccgcgcggcgcggctgcggcatacgcgctgaaccgcgagctggcgtgtttcaatccgacccgactggccacgtcgccttgggtgcgctgccaggagacgttggagatgttcgcgtggcagaccggacgagacatggttcatctcgatccgctcaccgaagatgcatacgccgctgcgccggacaccgcatgggagtgtctactcagcgaaatcgagttcgcacttgagcgccgtcagcccatagcgatatgcatgcaccggccggtgattggtggtatgttcggacacctgcgcagcatgtgcgttgcgccgtctctgagcaaacgcctgatcgccaagacaccgttcatgccgaccggcacggcggtggcgctgttcgtcactccgacgcctcatggtcccaaaatcatcgatattcagaaggttcaaccgcttgtctactagacccgcatttcctgattcatccaactcctcggccgctgccgctgcagctcatgccgcgcacaatggtgccgccggcagtctgggcccgggcttcggctcgttgcgtgcggccggagcggcattcggacctgctcgcatgggttcttcacgcccctcgcgcccggctcagctcgacccggctgtggccgatggattggccggtggcatggacccgcaggcgttgagcgagatgagtcatctgtctgctgccgcattgctggatcgtgtgcgccatagcgaagacccggcggttgtcgagcgcgtgctcacgttggtggagacggtcggcgtggatgaaatcgccgaactatggagcgataccgagccggattcgctgcctggtgtgctgtggcgactgtatatgttgcgtacgtggatgcgatcgaatcgcgactcgatcgcgcatctgtggcgcttgggtgagccggtggccactaccgcctccgccatcgccggcgtggatcaggctcccagtgaagatgacatcgtgcgattggccgattcgattctctccggtgcttttgtgggcgattttgccgtggcgcttgagcgtgcggcggcgtttaccgatgtggtggcgttgggcttgcgcgtggaggcgcggcgcatggtgacccgggccgaggccaacggcggcttctcctcggatgccgatgagaaggccgtgcgcaccaaagccgcccgccttatgcacaccgccggcagcctcatggccaccgccaaggatttccaacacggtgccaacctctggcgtcgcggacggttggagtaaccccgctccaggctccctctgatgagggagctgtcacgggcgatgcccatgactgagggagaaacccaccgaccgcaccccaacaatcagctaccggccaacgccaccccttccccggcgcggcgagacccatcgcaagctatactaagtatccgcgtcggaccgtgcttaagccccgggctccattttttgccgccgcgagcggcccttgcgccgacaggcgctttcgcggttcggcgcttcttttcttttaccagattcacgccccgagcgttgcgatgggcacgaccagtatgccgtcattgcggcgataggccttcccacctcggccggtaaggaacatcatgaattcggggtctcggacctgagccatgggattgccgcagattttgttgcggaaggatttgagcttatccgcattgtcatcgttcaccttaaggtcactgagttttatttcgatggcaccccacctgccgtcagacaactcgataatgacatcaacttcaagccccttgtcatcgcggtaatacgcaatgcgattcccggcacccggcatagccgacagatatacattcaaatcacgaatgcacagcgtttcaaacagatcgccgagcgtctgtgtatcgcgcatcagagtattcggcgcggcacctaaaaccgcagcaggcaacgaaggatccacgaaatatcgcttgggcttggttcgcacacgactctttgcgcggagtggcggttcccaaccctccaaatccgtcagaaggtacaagtccttgaacatttccaaatagctcttcaccgtctgcgtatccggctcacgccgctcatcgccatatgccatatccgcagccagcgtcgcatattttggtgcctgcgagatgttcacggcaagagctcgcatcaaagctcgtgcagtttcaggattcttcttcatcttcggcacgctgatatccagcacacttgcgatatattcgcccgggatttccaaggcgaattcatcgtctagctcaagattcgcgggccatccgccacggcaacaccatctggcgatgtcttcgatactcgtattgcattcggcaggctcgaatttcccctcgaacaaatcggataggctgaccgcgcccgtggattctccggattcagccaagctcatgggccacatgcgcagacgagcaatgcgaccagtgccgctgtgatgaatggcgtcacgatccttttgaatagccgaacctgtaagaatcagctgccccttgcggttcgcattgtcatctatatggcgacgagcggcatcccaaatttgcggtacatcttgccattcgtccaccagatggggctcctcccccatcagcaccaatgcaggatcggtttgggcggccgcgaaaactgccacatcatccagacgatcaacgcttcgagaccgggagagcgcggtccatgtcttgccgcaccatttcggcccaacgatttccactgcaccgaacgccttgagcagtttacttaatctgctatctaccacgcgtgaacgataatcaggcctggtcaaggtaccatcgcgaccactcaaatcgttcatattgcagcctttcccagttctatcgttctaacaatatagattttacaccagtttcattcccgattttacacctatctcattcccggttttacaccagtttcattccctgttttacaccgtgttgttttttacgctttaccctctcagaggtatcagaggcagatctcggcacggacagggcattgtcctgctgcaactggcctatcgcagcaaaaagtcgaatcacccacaaatccaatccgataagcaagccgcgccattaccaattcggcaggtcggcaaacttggactaggctgggaatcatggaactccatgttttgaatcatccgctggtcgagcacaagctcaccgtgctgcgcgacaagaacaccccctcctccaccttccgcgagctcgtctccgaactcgtgatgcttgaggcctacgaggccacccgcaacctgtccgtggtggccgcgccgatcgagacgccggtcgccccgatgaccggcaagaagctcgcctccccgcgcccgatcatcgtgccggtgctgcgcgctggcttgggcatgctcgacggcatgacccgcctgattccgactgctgaagtcggcttcctgggcatgaagcgcgacgaggagcaccccacccagcaggtgacgtacgcgaaccgtctgcccgaggacctgtccggccgccagtgcttcctcatcgacccgatgctcgccaccggcggaacgctggtcgccgccacgcactacctggccgagcgcggcgccaaggacgtgaccgcgatcaacatcatcgcggcccccgaaggcatcaagtacgtcgaggagcacatcgacccgtccatcgacttcaaggtcgtggtgtgcgcggtcgacgaacgtcttaacgacaagtgctacatcgtgccgggactcggcgacgccggtgaccgtctctatggcgtaattgactgatttccctggctcccctccccgaggggagccaacataacggaacatctatgcaaatcgacattattgcgccggggcgcgtgaaggagcgttaccttcgcgacgccattgacgagtattccaagcgactttcgcgctactgcaagctcaacatcattgaagtggcagatgagaaaacgcctgaccatgcctccgaaggcgttgaccgacagatcaaggccagagaaggcgaacgcatcgccaagcatctgaaggacggcgcgtttgttattgcccttgccatcaatggcaagcagctgtccagtgaagaattggccgccaaaatcaacgaccttggattgcgtggcaccagccatattcagctggtcatcggcggttcaatcggccttgacgacgcgattctgcgtcgtgctgattttctgctgagtttctcgaagatgacgttcccgcatcagcttatgcgcgtgattctgctggagcagatctatcgcgcttataaaatcaacgctggcgagccgtatcacaagtaaaacgccatacctcatggggcgggaaatccctcatggggcggtaattgccccatgaggcggcaaaatcctcatggggcggtatgccaaaatggcttaattccgcggtttcacatattcttcaaaccgccccatgggcaagttaccgcccgatgagcctgtaaccaccccatgggcgcatcaataacgccctcaacctcacactgcgtcggggacgaacgcttcgaagatgtggcggtcgaagtagggggcgcactgggcgagttcatcgctgctgcgtacggtccatgaaaccggcatcgcacccatcgaacgagcgagcttgacttgcggcgaagcgccaccggtccagtcataagccacgaaatcaggacgagacagccagtcgaacgccagtaagccggcggcccattcagccgcaccattcttgctcagcttcgccggccagctcagctgaccgcggcacacctcagggtgatgctccttgtaccaattcaccgcgcccgggtggaaggattcgatcacgtacgggccgtcatacgcctcaagcaaggcgtggcccttttccatgagctcttcgctacgctcatcccaagccctgttgttgctgaacttgtattccacaatcagcggagcccggccggccaccacgtccagcacatcggagaacagcggcacatgctggtagtaccccttcggcgcggcggacggcgtgaccaccagcggcgggttcgcgtcggcacccggcaacggttcggccttcaaatcgcctgactcgccgttcgggaagagcggaatacgggcgagttcgtcgtaagtcaggtcttcgatgcggcgcggatcgccggccacgcgcaacaaatcggcgtcatggaccacgaccacttggccgtcgagcgtaagctgcacgtcgagttcgatgccatagccagcctcgcaggcggcggcgaacgcggccagcgagttttcgggagcaatcggaccggtcatatccgcactgccgtagccggccttgacagccatgcgacgggcaagcgacacataatcatcgttttcggcgatggatcgctcagtggtatcggcttgggcgctaaccggattatccccaccataatcagcgatatcggtatagccgaccaaaccagaacccgcatcatgcaagccacgatgggcataccatacctccggaatggagggcacgaaattacgacgcttgtcattgaacgtgcgcggggccacggcccacacggcagcaccggcggcggccacgcctgccagcgccacgtttctccagagcttcgacgacattggaatccttcctgttgggctgcctctagcctaacgcttctgccagccattgtggagtggttggatcatccggtttcagcgcgcggtccaggtggttggcgcgcagtggctcccagctgaaatctgccagcagatcggcgggtttgcaaggaattggagtgggttgcagacgcagcagccaggcgcagtatccgatgatttgctcgggggttacgttgcgggcgcgcaaggctcccatatccagcgaacgttcgcgcttggctaaacgccggccggccgcattgtcgataagcggcaggtgcgcatactcggggtgctcggcgagaggcttttccgtgttgccgcattccggctcaaagccgccagccaacagacactggcgaatccacatttgcagcgcggtggagcgcagcagatcacggccgcgcacgatatcatcaacacccatatcgaggtcatccacgaccacgaccagttgatagccgaacagtccatcggctcggcgaatcacggaatcgcctacctcgcgggccaaatcgtagtgctgtggactatagacacggtcgttaaagcatgcgacaccatcaacgattccggcatcgccctgctgttccggcggcacggctcccgacagcgcagcggaatcgtcaggcactgtacgttgcttttctcccgctgccgattccggcatggcgatacggatggaatgctggtcgccgcgaaccaaacgggcacggacctcgtcgggatggtcgtgcagcaggcggcggcacgtgccggggtacaccatgaagccgtcgccctcgttgggggccgaggcggcgcgaatgtcggcacgcgagcagaaacaggggtacagcacaccttgcgagcgcaggcattcgagagcgtattcgtatcgttcagtgcgctgggattggaacatcggttcgccatcccagtcgaggccgagccaatgcaggtcatccatcatgagctggtccgcaccggcgaccacacgcggcttgtccacgtcctcgatacgcatcagcatgcggtcgccacgcgagcgggccgaaagccatgcacccaacatggcgtacacgttgccgatatgcatgcgccccgacggcgtcggcgcgaatcgtccagtcactggccctcctcgtatgaagttcagcaccatggtagcgaaaaggctctcctcctcagaggagagccaatatagtgaagctcgccagcccgaactcccctcagtcagcttcgctcagagaggggagccagtgattgtcacttgtcttcggtgacgttgtccacgctcacgtccggattgtcggagacaatctggtcgctcgcccaagcggagagctccagatgttcgccgccggtctggtcgacgagcacggtgtcaccgtcgtggaccttgccggccagcagcatacgggccagctggtcgcccacttcggtctgtaccaggcggcgcagcggacgagcgccataagccgggtcgtaaccggtgttggccagccattcgcgagccgagtcggtgacgtccagcgtgatgcggcgatcggtcagacgctgggacacgccagccacctggatatccacgatgccgccaagctcctcgcgcgtaagcgggtggaacatgacgatgtcgtccagacggttcaggaactccggcttgaagttcatgtggacagcgtccatcacggcctttttcttggcgtcggcgtccatgtcctcgttcacgaggaactgcgagccgaggttagaggtcataatcaggatcgtgttcttgaagtccacggtccttccctggccatcggtcaggcgaccatcgtcaagtacctgcagcagcacgtcgaagatctccgggttggccttctcgacctcgtcgaacagcaccacggaatacgggcgacggcgcacggcctcggtcagctggccgccctgctcgtagcccacgtagcccggcgccgcgccaatcaggcgcgagaccgaagccttctccatgtattcggacatgtcgatgcggaccatggccttctcgtcgtcgaacaggaagtcggcgagcgccttggccagttcggtcttgcccacaccggtggggccgaggaacaggaacgatccggtcggacggttcgggtcggagatgccggcacgcgaacggcgcaccgcgtcggacacggcggcgatggcttccttctggccgatcacacgcttgccgaggtagtcctccatgtgcagcagcttctcgttttcgccctgcatcaggcggccgacgggaatgccggtccagtcggagacgatctcagccaccgagtcggcgtccacacggtccgggaccatcggctcatcggccgggttggccgcgctggcatcagcagattcagcatccgcgctctccgcggcggcaagctccttctgaatggacggaatctcgccgtacagaatcttcgaggcctccgccaagttgccttcacgggtatacttatccgcctgcacgcgcaggtcgtcgagcttggcacgcaggtcgccgaccttgttgtggccagcctgttccgcatcccaacgcgccttgagaccgctgagcttctcacgggtgtccgcaagttcggcttgcagcttgcccagacgctccttggacgcaggatcctcggccttcttgagctgcatttcctccatttcaagacgggtcaccttgcgctgcagctcatcgatctcctcaggcgaggagtcgagctccatacgcaggtgagcggccgcctcatcgaccagatcgatggccttgtccggcagctgacgacccgaaatgtaacggttcgagagggtcgcggcggcaaccagcgcgtcgtcgccgatcgttaccttatggtgcgcctcgtaacgctgcttcagaccacgcagaatggcgatggtgtcttccacgctcggctcacccacgaacacctgctggaaacgacgctccagcgccggatccttctcgatgttctcgcggtactcgtccagcgtggtcgcgccgatcaggcgcagctcgccacgggccagcatgggcttcaacatattgccggcatccatcgagccttcggccgcacccgcgccgacgatggtgtggatctcatcgatgaaggtgatgatctgaccatccgcattcttgatttcgttcaggacgctcttcaggcgctcctcgaactcgccacggtacttcgaaccggccaccatggagcccaagtcaagggagatgagcttcttgccttgcagggtggtgggcacgtcgcccgccacgatacgctgggccaaaccctccacgacggcggtcttgccgacgccgggctcgccaatcagcaccgggttgttcttggtacgacgggagaggatctgaatcacgcggcggatttcctggtcacgtccgatgaccgggtccagcttgccttccttggcggcggccgtcaggtcggtggagtacttctctagggccttgtacgagccttccgcgtccgggctggtgaccttcgcgccaccacgcacgccgggtacggccttgcgcagggaggctgcggtgacgccgttcttctccaagatttcggccgactggttcggcttgctggccgcgatgccgataagcagatgttcggtggagacgtattcgtcgcccatctgctgcatttccttctcagcctgggcgatggcggcggtcagctggcggctggcctgtggctgcgaggtgctggatccggatgcgctcggcagcgcgaccaaagcgttgcgcaccgccgcgccgatggcctgcgggtccccgcccgcggcctcgatcagagagcgcgccacgccgttttcctggcgcagcagcgcatccatgacgtgcagggtctcgacctgcgcgtttcctgcggcggacgcactctgaatcgcgtcgccgacggcttcttgggccatagtggtgaacttctgttccatatcgtattcctccatatcatgcggtctgcgcagtgcggctcgcgggcttcgaaagccctgcgagcgttgcgacagaccgcagcttgtcgttgtctgatatggtcaaccgacctggaacccattctattcccaaaacttgagtgcatatgactcaagttttggattttggtggggagggtgactagtagccccctctgatgaggaagcttgggcagccgctacttcagtgcgccgacggcggattcggcggcggcgaggacttcgccggagagaatcgcctcggccacgccctcaatctgcggggtggtccaggtatcgcgtacgtcggggccgatttcgttggcgtactggcgcaccacgcggtatacggcggcgcccgccgcacccggacggtacggcttgcggaagtcgaaggagcggcaggagcacagcagttccacggccagcacgcgcgcaaaggccggaatcgaccggcgcagcttgcgggcggcggcccaacccatcgacacgtgatcttcctgcatggcggagcttggaatcgaatcgaccgaggcaggcacggcgttacgcttcatttcggagacgatgccggcagcggtgtattgggcgatcatgaaaccggagtccacgcccgggtcaccagccaggaacgccggcaggccgcggttgcgcgccacgtcaaggaagcggtcggtacgacgctcggagatagaggctacgtcggcggtcggaatcgccaggaaatcgagcacataggccagcggcgcgccatggaagttgccgttggactccacacggccgtccagcgtgacgcacgggttatcgatggcggaggcgagttccacgcccgccacggaggccgcgtattccacggtgtcgcgggcggcgccgtgcacctgcggggtgcagcgcagcgagtaggcgtcctgcacacgcacggtggagcccgggcggccggcctcaatcagaccagagtccttgagcatgcgggcgatgttcgcagcggaatcgccttggccgcgatgcgggcgcagcgcctgcaagtcggcggcgaatacgcggtcgttgccgagcatgccttccacgctcatcgcggcggcgacatccgcggtcttgagcagcaggcgcagatcggtgatggccatacacaacatgccgagcatgccgtcggtgccgttgaccagcgccagtccttccttctctttcaaatcgacgggcgtgatgccggccgcacgcagcgcttcgccgccgccgatcttgaggccgtcagcgttgcgggcctcgccttcacccatcgccaccaaagcacaggctgcgagcggcgccaaatcaccggagcatccgagtgaaccgtattcgtagaccaccggggtgatgccggcgttcagcatatcggcgtagacctgcgcggtttccgggcgcacaccggtgcgtccggtgcacagggtgctcaggcgcagcaccagcaggccgcgcaccacctcacgctccacttccggtccggcaccggcggcatgcgagcgaatcagacttttctgcagctgcgcacgctgttccttggggatggaggtggaggcgagcgcgccgaatccggtggagataccgtaatgcggcacggtgtcgtcggccaaatgatcgataaccgcgcgactcagcgccatctcatgcttcgattcgtccgaaatcgccactttggcaccgccgcgcgctacggcgataacgtcctcgatgctcagcgctccaacacctacggtgaccgtctgctctgccatgctcatacctttctatatatgtgccgcattccgcatatacgacatatgcggcacatgcttcgccggggatccgcgactgcccgcattcgctcaccgcacctgcccatcaacagcaggcgacgcaaacgcgaccaatcgctccccgagtaatcaaaccttggccatttcacctcagtcggatgcccgccataagccacttcgtccatcttgtgtctgaaatctcagacatgtaaggtgatggaaatatgagccatgcctcgcagcaatacgccttcaccgagccacgtaccgtcaagcgggcgcaggtgaagccatcagaacgggaacatcagacatcatcatccgcgccacgtgtctcgctggctccggcggccgaccgtacgctcgacatcctcgagttcatcgcgagcaatggtcagacgcaagccgccacgctcgctcgcgaactcggcattccgcgctccacggtgtaccaattgttggagattttggagcgtcacggactggtcacccgccttgccgagcagcgcgcgtacggcatcggactcaagactttcgagctgggatcggcctattctcgccaacatcgtgtatcgcaggtcgcgcatccggtgttggcgcgtcttgttgacgagaccggcgaaaacggacatctggccgtgctgcacggcaacgaaatcatttatgtgattgaggagcgcgccgcgcatcgcccgccgctagtgtcaggcgtgggcgtgcgcctacccagtcacctgaccgccaccgggcgggccattctgtccgcactcccccgcaatcaggtccgcgcgctatatcccaatcgtcaggcgttcaccgaccgcaccggcatcggccccaaatcgcccaaggagctggaggcaacgctcgccgaaacccaacgcaccggttttgccgaggaacacggagacgtgacgcccggctttgattcatacgccgtcgctgtgcgcgactacaacgactttcccatcgccgggctggctctcactttcgtgagcggatcgctgcgccccgaacaggagcggtcgcttaagaccaagctgcggcttgccggcacggaactgtcccggcgtctcggcgcggtcggcagtttgacatgaggattcgcgagatcatcgtgctgggctccttcgccccgatcacgattttctcaactaagttcaccgattcgctgaccggcaacgccaaactcgccggcttctcgctgacagtgacggccatcatcagcctggtggtgatgaccgccctgcacgcacttctgccgggagcgtaaggcgcgttcttggttccctcagtcagcttctccgcctggacggttcccctcagagaggggagccagaacgagtcacgcccgaacgattacgttgcgcagatcaccgatgccttcgacgtgcacgatggtctcgtcgcctgggtcgaggtggccggaggcgttcggggtgccggtcatgatgacgtcgccaggcagcagcgtggagaacgacgaaatggcggcaatctgctcggggatgccgtgaatcaggttcgcggtggtgccagacgccatcggcacatcctcgccgttcagcgtgaaggaaatcttggcgtccttccagtcgaggtcgtcacgcatcacgatccacgggccaagcggacaggaggtatcgaagcccttggcgcgcgtccacgtggggtcgatgccctgcagatcgcgcaacgtcacgtcgttgacgcaggtgaagccgagcacgtaatccatcgcgttttcaacggacacgttcttggcgatgcgtcccatcaccacggccacttccggctcgaagttcatgtccttggagcaggccgggtacacgatcggatcgtcggggccgattaccgaggtggacggcttggtgaagatcaccatgtcctccggcgcgtgggcgatttcggaatggccggcctcgtgcatgaactgggcgtgggcctcgtagttcttggccagaccgtaaaccttggaggggatcaccggggaaagcaggcggatgccgtcgccgtcgaccgggtaacgagtgccggtgggcttgacctggtcgccggccagcggatgaccgtcgagttcgatgaggtagtccttgccgtccgtttcgtccttttgtacgaaggcgtagcgcggcgaatcattcaaagaaaaacgtgcgagtctcatgcctgtaagcctactccttggcggttccttccgcagaagcatccgtccaaggagcaagcagaccggccttcaatcgaccaaaacgcacgttcgctgggattgctacttttcggtccaggttttgtcatacagcgactggccgctttgcgtgtgcatgatgacgcgcaatgatgccttgccgctggaggtcttgcacatcgagcccagcagattcgcggtggattgataggtgctgtccatagcatccagtgaggaagcgaaggtatcgcctagcgaggcgtagctgtcgtcgagcacgtactcgtacaccaaggtgtcaccgtcgacacggtagttgaaggtgatgccggtgtctgcaaacgtatccgcttcggattcaatggagtccttgaattccaaagagtcgacgaaatcctgaatcgaatcgtacagcccataatcgccgtcggttagatcgtcatgggtttcgcccaacgtgtcgtccagcacatcgtcaagattatcttgagctttgctcttatcgctgctatcaccgttgcccgaagaggactgactatagaaggaatcggttttcgcctcatctatagccttgctggcatacgaggcaccgccgacgatcagcgcgatgaccagtattacctgtatcaccatgcccgccgcactgatgatgatgccggcgatggccaagcccttgcccttgccgccctgtttcttaatctggttgaggcccacgatgctcaggatcagaccgaggagtgagacaaggaacgagcagataaaaccggcaatagccaggccgttgtacttctggttcgcttcaggcggcacactgccgtaagaaccagaccatcccggctggccgttcggttggccgccttgcatatacgggttatagggcgtttgcggaggcacggccccgccgcccggatataccggagcactgacgctgccgtagaccggaggaaccgatccgcctgccggagccgcccccggatagggcgaattgggcgctgccggtgcgggcgcgggcgcagcggcaggagtcactggtggcaaagcctgcgtaggcggtaccggctgattggccggcgcaaaaggctgggtgggctgctcggcaggtgtaaacgcctgcgtaggctgctcaacaggagtgaacgcttgagtgggctgttcgcccgctgcgattgcttgggttggagcattgttggcggcggttcccgtttccgccgtcatcgcatttaacggctcggtcagattggcgtcagcctgctgccacggcacctggctgttcggattgacattcggatcagtcatgacatgcactccttcaactgcatcgcaccccacttgcgagatgcgcccctcgtcttacgcgccacattgtgcgttacagacaactgtactcctcgtggcgagccttaagtaccccaggaaatttggcttcccaaaaaacacagaagcctgaaaccggctattgcctcagcaatattcagtcggtttcaggctcaatcgttaatcctctggtgaaacgacggtctacttcttcagcagcggcgcgacttgttcctcgtaggcggtcagggcggtgtcgatcacctggtgcatgtcatagtacttgtacgtgcccagacgaccgccgaacacggtgttcggctcggccgcggccttggcctcgtaccgcgcgtacagggccttgtccgcgtccgtgttcaccgggtagtacggttcgtcgccgcgctcggcgaagcggctgtactcctcccacaccacggtcttgttcgggttctgggagtcatgacgttccgggttgaagttcttgaactcgatggcgcgggtgtagggtacgtccgcgtcggagaagttcatcaccgggcagccgaagtggtcgccctcgtcgtagcgtacttccttgaagtccaccgtgcgccacttgaggtcgcccagctcatagtcgaagtaacggtccaccgggcccgtgtacaccaccggcacgccggcggccttgagcgcggtcttgttgtacggctgggactcgtcgaagaagtcgacgccaagctccacagtgatgcgcgggtcgtcgatcatgcgctccatccacttggtgtagccgtccgcgggcaggccctcccacgtgtccttgaagtagcggttgtcgtagttgaagcgcaccggcaggcgcttgatgatggccgccggcagctcggcagggtcggtctgccactgcttgcccgtgtagttcttgatgaacgcctcatacagggggcggccgatgagctggatgcccttgtcgttcaggttggccggatcggtgccggccagctcgcccgcctgcccggcggcctgcgcctcggccggcgtgtaatgcgcatggaagaactggttgatggtgcccaggttgatgggcagcgggtagacctcgccgtcatgcgtggcatacacgcggtgcacgtagttcgtgaagctcgtgaagcggttcacgtaatcccagacgcgcttgttggaggtgtggaacaggtgggcgccgtacttgtggatctctgcgccggtctcctcgtccatatacgagtaggcgttgccgccgatgtgatcgcggatatcgatgatgtgcacgcgggcgccggtgtgctccaccgcctgctgcgccaccgtcaggccaaacaggcccgcgccgacaatgactaggtctgggtattgagtagtttccggcatgcgcgcattccctttcataaagtcaatatatcaattattatgttcgatttccgagaaaatatcttactcacccaattgcaaatcggcaatcttcctagactgaccagaaaactggacacaatccaagaccagacgacagactcaaggcaatgcatggcatgttcttacatttctgtgtctttgcccggacccgttcgccgccacaaagacagagcgcagaacaacgcaaccaccaatataagcccccgcactcaggcaaacctcaggttacgattggtagatatgagcaattccgaacaggccctcgactcaaccaacgaagcggtcaacaaagcaaccaacccatcattcgcgccgcaacacattctggttaccggtggcgcagggttcatcggcgcaaacttcgtgcactgggtggcgcgcaaccatccgcaggcccacatgactgttctggatgcgctcacgtatgccggcaaacgcgagaatctcgatggcgtgccggccgcgaacctgacctttgtgcatggcaatatttgcgatgccgagcttgtggaatccctgttttctgggctgaaccaacgctctgcagccgcagtacccccgattgacgccattgtgcacttcgccgccgaatcgcataacgataattcgattctcgacgcctccccattcctcaatacgaacgtgaccggcacgtacgtgttgctcgaggccgcccgccgccacgatattcgattccaccacatcagcaccgacgaagtgtatggcgatctggctctggacgaacagcgcaaattcaccgagctcagcccttacaaaccgtccagcccgtattcggcgtccaaggccgccagcgaccacttggtgcgcgcctggcaccgcacgcacggactcaaaaccaccatcagcaattgcagcaataactacggcccctatcagcacgtggagaagttcattccccgccagatcacgaacattcttgccggcattcgcccgaaactctacgggcaaggtctggctgtgcgcgactggatcagcgtggaagatcactgcagtgccatctggactattctcacccgaggccgcatcggggaaacctacctcgtgggagccaatggcgaatacaacaacattgatgtgttgcgcatgattctgaagctcatgggtcgtgacgccaatgacttcgaccatgtgaacgaccgccccggtggcgataagcgctatgccatcgacgccaccaaacttcagaccgagctcggctgggtgccaaagtacaccgatttcgaggaaggtctggccgcgaccatcgactggtaccgcgcgcacgaaagctggtggatgccggataaagccgggactgaggagaagtaccggacgcaagggcactgataggccattgacaggccgccgataggtcactgacagcgcaatcaatgaataccgattgcgagatttggtggcgaaaatatatcttatgttgtacaataatcatgtatttcaattataaattgattattatgacttttaaagaacggtaatgcgatgattcgtttacaaagacttgttctagacaacatgaggaacatatcgcacggcgtcttggattttgacgatctgcccgctggcggcagcgtaacgggtatctatggacagaatggatcaggcaagaccaccgttatcgatgccatcgggatactgcgcgcgctgctatccgggaatatgctgccggacaccgccggcgatgccattagcgtcagcaccggtcttgcaaccttgacggcgacgctcctcatcgggggaaaacagaagcccagctaccttgaatacaaggtgtccctgcgtaaagcgaacccggattcgacgcgagcgcgcgtcgtttccgagtcggttcgcatcggcgatgatctctcacgcctaggcagggaggcgttggggcatcggacggaggattctgagaccgatggtttcgtgtcaactccggtatatgtgtggcgctccatcgaggcggtaacctcggtgaaaaccgtggtctcacgcaccgctgatcgtgcgtacatggaggggcgctcattcctgttctcgcggtgtgccacgcttgaagaccgacccgatgccgagttcctcatcgactgggtggtctcccgcgtacgggaagcgaatggtgtgtccgccagatcactgacatacatcaacgaacgtttcgatgagttcgtacgcctacgcaaggccttatgcgattacgcgaccaatgatgtcttcgtatccactacccgtcgtggctcctatgccgcatatgcgttcatccccatcatggaggaggattccgcaggtcgcaacacagagtttctgttcgacctgttgcaaccgaacccgctgaccccgggccaggcgaaacgacttggacagaccgtggagtccttcgaccgcatcctgcccaccctcgtgcctggtctgcatgtcctgctgaagatcggaaccgcgccttccggcaaagatggcgaggaccgggtcaccgcggagctgttctcgcgtcgtggcgatatcacggtcccattccgctgtgagagcgaaggcatcatacgcatcaccgcgctgcttggctatctcaagcacgcgtataacgacgagaacgcactggttgccgtggatgagttcgactccggcgtgttcgagttgctgctcggtgacatgctgtaccagttggcggacgggtgcgcagggcagctggtgttcaccgcccataacctgcgtgcgttggaagtgctgccgaacggctgcattcgcactacagtgaccgatcccaataaccggttcgcgatcatcccccgcaagtcctccacgaacaaccagcgccgacggtacctgacggccagcgagctcggatggagcggccccgacatctatgattcgcccataccacgcatgttcggcaacagtctctatgccgccggccatcccgatgaggacgatgacatcgacgacgatctggcagcactcaacgcctcaggaacgaaggtgaaccgtggctaaacgcaagatcgtcctgctggtcgtagaaggagcaagcgacgccagcctgctcgtgccggcattctcgtcgttaatcgagaaccgcctattccaagggcaggaattccactgcgacgtgttgactgcgccaaaccaccgtgaggagttccgacgtcgtaacgggttctatccagcggacaatcctgcccagacggtgcgcgaactcgtggagtactacctcagagaccacgaccgcacctggggccagctcggccatgtcatccagatctgcgacctagacggagcgttcacatctgacgaccgagtgcgggaagacccattggtggatggaacgcaatattcaacgaccgacatcatcacgccaaaccgcactatcctgattgcggatcgcacgaccaagcgaaacggcgtggatgccttgctgaaactcgatgggttcaggaagaagaacggccgcgccacgctcatggtcccgtaccgcctgttctacgtcagccgcaacctcgaacacgcatttcgcggtaggattgacaatctagacgcacagcacaagcagagcagcgccatcaaactagcagaccgctttacccgcaacccgaacctgttctctacaacccttcaatctcttcggcgaatacacggcaatccgacaacgtgggaggaatcttggcaatatgccatgcaagacctccactcactcgaacgcggtagcaacctcgcattcgtggagccatacttggcaggcgaactgcggtaaatccatcagaatagtttcagaaccatagctggttcaagctcagctagacaccaaagttggaaaacgtagcccagtgcaccttattcgataaggggctgcggacattttcttggagatagtcatgcagccattccttggctttgacgatattgtaccggactcatccagcccagcgactgtttgatgtgctcgtggtcgtaccagtggatgtactcgtcgatcaggacaagcacctcgtcgcgggtgcgtttctcccaatgctcgggatagacggactccgtcttcatgcgaccgaagaatccctccgcggcgtcgttgtcggggctgcagcccttcgcgctcattgagcgcgtcagcccgtagcgttccatgagctccagccatccgggccaccggtagtggcagccgcggtcggaattaaaccgatgtcggtttaactcggattaagccgggtttgttgttaagccggggaacggttcggggtcttggtggctggccgtgtcccatgtggtttcccggcttaacgttccgggttatgttcgtcttgtcccatttgattcgaacgaaggagtttgccatgggtgagacgacggttggccatgtcgcgggcgaggtggtccgcgcgctttacggggccggttatatggaatccaccataggccagtaccgcaagtccatcagggcgttggaacggtacgccggaggcccggatgcggtgtacacgcgtgggttgggcgcggggttcgccgcgtcgaccttcagtgagcggacgggcggtttcagcaggcagcggtggttcgattacggcaggctggcgcgtttgtgcgactcgtatctgcggtccggttcggtggacctgggcaagtggcgcaggagcaggcttgcggagccggtggttccgggtttggccgtggtcatggagcgttgggaggcgtatctcgccggttcgggactggcttcggcgacggtggggcattaccgtcggatggcgggcttgttcctcacgtggctggaatctcatggggtcgtgtcgttggatggttcggatggctcgcatgtgctggggttcctggccgggctgcgttcacgctggtcggagtcgtcgatgcggcacgccgcgtcggacctgcgcccgttgttcagatggctcgggcgggatgacctggcggacgcgatcggcctggccggcatacgcaggacccacgcgatcgcgggaacgttgcccgacgacgagcaccgccgcttgctggaggcgtgcgcctcgcggtcggtgccgtcgagggacgcggcgatcaccctgctgtcgctgacgtgcgggctgagggcatgcgatgtgatcggtctgaggatcgccgacgtggattgggattccatgagcataggtctggtgcagcgaaagacgggcaatccgttgaccgtgccgatgacgggaccgctggccgcgaggctggcgtcctggctgttggacgaaaggcccgccaccgacgacgaccgtgtgttcgtgcggtacaaggcgccccatgtcgcgcttcggggtcattcatcggtgtacgaggcgatcagccgtgtcatgcggcacgccgggctcggacgccggggcggttccaggctgttgcggcgcaacgcggcgacgaggatgctggaggcggccacgccgttgccgacgatcagcgcggtgcttggccacgccgaccccgattccacacgcgtctacatggccacgcaccgcgggggaatgctcgcgtgcgtgctgcccgtgccggaaggcggatcgtcatgagacccacggaacacggattcgtcggcccgctcgccggcgaattggaggagtacatccgcttcaaggcgtccatgggcaggcatggcgccacccgcgtccgggtcctgcgctcgttcgaccggcattgcctcgaacacggggccgtgcgtctggagcggggcgtcgtggagcgatggatcgcccataggatcgacgcgaatcccgggggttgccgctcgtggttctcgtacatcagggacttcggcaggtggatgcgactggcccacgatcccgacgcgtacgtgctctccgaccagtggaaggccggatccccgcgtccgacgccgtacctgctgacggaccgcgaggccgccctgttcctgcgggccgcgggaacgttggagtctccgtcgccgtgggcgtggcagtctcgcgcgttcttcatgctcatggcctgctgcgggctgcgcacccgagaggtcaggagactcgccgtcgggcacgtcgaccacaaggcccgttccatcgacgtggtcgattccaaggccggtcgcagccgcaggctgcccgtgggcgacgaggtcgccgccgaactgctggaatgcgaccaacggtcccgcgaacgcttcggagacgaccgtcccgcgttcttcgtcacctccaccggcaatccggtctccccgggcatgcccggcgtggtgttccgccgcgtctggacgcgtgccgggctcgagtggccacaagccggcaaacggcccaggccctatgatttccggcaccggttcgcgttcgcgaacatcgagcggtggactcgcgacggcgtggacgtgatggcgatgctgccctatctggcggcctacatgggacacgccggcatcgacagcaccctctactacgtgcacgccagccccgatttcatggacggatacgcggacctcgtcgccgacgccgaacgcgtggtcccggaaacggaggaaccatgagcaaggcaaggaaaacggccgccagctccggtgaaccggacttctggcgagtcgcgcgcgactggctgcaccactggctgcccaaggtgcggggcagctcgccgaagaccgtcgaggcgtaccgcatcggcctggaatcctacgtccgatggctcgaaaccacggaaggcacgcagcgcagccacatcggtttcgggcatttcgaccgggcgcgcctgggccggtgggtcgaatggatgcggaccgagcgcgggtactcggaccgcaccatcatgctgaggatgacgacgatgcgcgtgttcctcgaccacgcgggcctcgaacacccggcattgaccgcgctgggcaacgacgcggccggcatacgtgtcaaaccacccgcgcgcaaacccgtcgaccacctcggggaggagcacaccaaagcgttgctgaccgcatggggcaccggcgacgccaaatcgcgcaggaaccgcatgctcctgatcctcatgtacgacaccgccgccaggatcggcgaactcgccgcactgaccatcgcggacgtgggtatggataagccggccagggtcacgctcaccggcaaacgcggcaagagccgggtcgtgcccctgggagaaaggacacgaacccacctggccgcctacctcgaggaattccatcccggaccgtccatgcgcgacggcgacaggccgttgttccactcgacgaggaacggcgccatccagccgctctccgtggaccggatcgacgagatcctcaaaaccgcggcggccagagcacgccgcgggacgtgcccgtccatgcccgaacgcgtccactgccacctgatccgccggacccgcgccatggacctctaccaacagggcgtgccgctaccgctcatcatgcaactgctcggccacgaaagcatgagcacaaccagcgcgttctacgcgttcgcgaccctcgacatgatgcgcaaagccgtcgatgcggccaaccccggccccgacccctccaaggagacatggctcagcgagcaacgactccgacaactacacaccctcaaataacccggaacgttaagccgggaaaccacatgggacacggccagccaccaagaccccgaaccgttccccggcttaacaacaaacccggcttaatcggaatggaccacgggacgggcgttgtcgggcagcgtctccgccgcctcggcgagcatccggttggcgagctccgcgttgggatggaagccggccgtgtaggcgacgatcttgccgtcatggcagtcgatcatcggcgagaggtacaccttcccgtcccgggccttgatctcggtgatgtccgtcagccacttctcattgggccgttcggcggtgaagtcccggttgacgagattaccgggagcgggcgtggtctccccctcgtaggagctgtaacgccgccgtttgggaacatgcgccgagagcccgccctcggccatgatcctgcggatcaccttctccgagacgcccgtcccgagcgcggccttgacgcgacggtacccgtacctgcccttggagtcggcgaacgcccgcgccacgcgggcgcgcagcccggcgtacttgtcaacgccgatcccggcatggtggtagtggtagctgctcggcgctatgcgcagcaagcaggccatcgacctcagcgaatacctcggcctcagccggtcgaccggcatcgtcttctccctgttcgacaggcgccgcaggtcggcgcctgggtctttttctgcgagcctccaccacctcccgcatcaacgcgttctccaactccagctcctcgaccctacggcgcaacgcctccacgtcatcgccgcccccggcatccgccccgccccgaggacggacggacgccgatttcccgccctgggcggcattctggttccggggctgcaacgcggccatgccgcccctgcggtacgccctgacccagttgtgcaccgcaccaacgctcacgccaagctgtttggcggcctgcttctgctgcatgccgcccagcaccagttcgatcgccttccgtcttgtctccagaggaattatgggtttggccatacggccagcataccggggatccatcgccagccagcgttccaggcactgtctggtcggatagcccaggcactccaccacctgcgcggtggtcatcggcgttgtgaggtatagctccaccgccctcgaacgctcctcaaaactgaacatacgagaaacctttcgctcagtctccaagaaaacgtccgcagcccccaaccccttattctggttataaaacgtaagaacagggctcaaatttggttggaaaacgtaaattattacgtatgagatggttggaaaatgtaaatgcccccgatgtctatttagaggtgcaacacccctgttggtcctgcaattctagcagttcgtcggcgaatgcctcggcggcccgggttctaaatagaagtgcaacaccttgtctagggttggaagtgttcgaagtttctaacttaagaaggtgttgcactcatgggtcaacagtattcgcacctgtcgtccgaggagaggatcctgatcgagaagctgcattgcgaacagcatctgagcattcggcggaccgcggaggaaatcggtcgggacaagtccacggtgtcacgcgagctgaggcgcggcctgtggttcgcgtccaacgagaacgggtcgtaccgtccctaccggccgaaacggctgaagaccgggccgtggacctcgggtccgttctattcggcgctggccgcgcagaggaaggcggacctgcgccggcgcggatcccgcaagccgcgtctgtatttcgtcaagtcggtgtttcgtgtttagtcatgtatttttttcgggtttaggcagttgcatgcattttccttatttttccggttgcgcggaggtgttcctgccgaacatgagggcctcactgacgcggcggctctggccggtgaactcgaggagccgcccgtggtgcacgatgcggtcgatgatcgctgcggcgagtttgtcgtccgcgaagaccgtgccccatttactgaactcgatgttcgtggtgaatatgatgctccgtctttcgtagctgcccgcgatgatctggtagagcaggcgcgccccgtcgatgtcgaagggtacgtagccgaactcgtccagtatgatcaggtcggcacggccgatgtcccggagcatcgtctcgagcgtgccgtcgcgtttggccttgcccagctggaggacgagctcggcggtctgatggaaccgcacgcccagccccatgtcgatcgccttcatgcccagcccgatcgcgagatgtgtctttccgcgcccggtcttgccgtagaacaccaggtcctgcgcgcgcgggatgaaaccgagccctaggagctcatcgagcatgtagccgtcggggagcctgacgttcgtgaagtcgtagccgtcgagacccttgacgacggggaaccgggcgcggcgcaggagcctgtcgtgcttcgcgcgttccctgttcgccagttccgtgtcgagcaggcggtgtgtgttttgtcaagttggagtaggccgtttcggcgtttcttttagtccatgtgagcggcgggtttcaggccgtttcggcgttggccggtcctgctggttgttggttattgcattggttattgcatgagggcgtgggtcttgcgccaggattcgccctcgaagcggatcatccgtccgtggtggacggtgcggtcgatgattgcggcggccatgttggggtcgccgaagatcctgccccatccgctgaactcgatgttggtggtgtagatgatgctctgggtctcgtacgcgttggtgacgacctggaacaggagcctgctgccgtcctcgtcgatgggcacgtagccgagttcgtcgatgacgagcagcggggtcctgccgatcgcggcgagttcccggtcgagccggttgtccgattgggccctgaggagccgcatgaccaggcctgcggcggtgaagtagcgtgcgggtatgcccttgcggcatgcgttcctgccgagcgcgatggcgaggtgggtcttgccggtgccgggagggccgaacaggacgaggtcgtcgtggccggcgatgaagtcgagggtcgtgatctgcccgcgcccgtagtcgacggggaagcggatcggggtccagtcgtagccgccgagctccttgtcggcggggaatccggcggccttgagcaggcgtgagcgtttggagcgttccctggattcgatctcggcgttcatccacgattccatgaattccatctggctgggggtcgcgtccgcgagctggtcggcgaggacctgacgggtcagaggcagccgtctggccagggtcatgatcgttgcgattctttcgccggtggacgcgcgcctgcgtttcatgtcgggcatgacgaccggcggacggtgggttcccatggtcaggcctccttcctttcccatggctgtcggggtttcatgaacacgtcgtatccggtcaggtcgggtaccgaccgctcgtacggcttctcgccggcggcgatgcgccgggccatggtggtcacactggcctcgtcgatcgcgtgcccctgttcgaccaggtgctctccggcccggacggcggcctcgaagccggacgcggcgctggccttggcgatgacgcggaacgtggtcctgcgtgtcttggcgtccatgcggtcgatggcgatcctgagtttgtcggggaaatcgtcacggatggtggaatcggtccatgcgtgggtcttgcggctcaacgcgggcaggagcgtggcggggttgcgcaccgtggccggcgaatccccgtacacgcgcggcagtctggcacaggtgcgtccgtcctgggtgcggatcgtcacgtcgaacgcgcgcagacccacgtcgagagtccagccgcgccacgaggggccggcgaggtagtagttgccgtcgatctgcacacgcccgtccttgtcggccttcctcacctcccaacggatcgcgtcgtacggcttggcgggaagcggctgcatatccatcttctcaccggcgaacaggccgccgatcggcgcgcccttgcggtaatgcgtctccttggccatcgcgtcgcaacgctccagcatgtaccgggtcagttggccgtgggactctgcgttgagcatgggcaccatgatgttgcggcgcaggaacccgaccgcgttctccacgctgcccttctcgttgcccgagttcgggttgcagaacctggtctccagccggtaatgctccacgaacagttcgaacacgtgcacgacggtgaccttgtcccacgcgatccgatggccggcgccggtggcgttgtcaagcaccagcgtcagggggaccgcgcctatgtgctcgaacaccgtgcgcagccccgcgcacacgcattcggcgttctccccgggcagggccacgcagtagcgcatgttcgaatacgggaacgtgacgaccaggcaatgcacgtcgacccggtccccgccgaccacggcctgcgccatgccgaaatcgacctgcgcctcgcccggatgccacttgagctccagatacccgtccgacgggaggcgatgctcctcgcgccaccgtttcacgtaccgctgcaccggcgaatacgagccctcgtagcccttctccgacacgagtctgtcgtacacgcgcttggcggtgtgccgctgcttgcggggcatgaaccggtccgcctgcagccacccgtccaccgtcgccctgaacggatcgagcttcgacggccgcgatacggagcgctccggtccgggagagcaatcctccctcccggcgtacttcgcgaccgtgtcgcgggccacgcccacctctttcgcgatgctcctccatgacatgccatgcgcgtcaagcaccctgatacgttgttgtacggacaccggtaccgtcattcctttcctttcccgagaaaaccgaacggtttgactttcaactcgggaaactagtccaggcaggacgggccggtgttcgtttctcaccacacgctgaagtggaccagaacctgccgctcacatggaagacatccacacgctcacacggcccactttctattgaacagacacagcggtggacggcgtcgacctggcggggcgtggcccagccggcgaattcgtcgatgctcgccttggagatgaacagcttgcgggccttctcgtagagcccttcgtccgtcttcgtgttcatcgcccgccttcctgcacgccgacgtccgcggtgaacgcgatgtcgtattcactcagatccggcctgtcatcgtcgtattcgatacccgccacgccctcggcgagcctggccgcgagcagtgtgacaccggcgcggtccgccccgccggtcgattcgaggatggaaagcatcgcctcgaccgcgttcgcccacccggattccctgtcaacgcgtttgagggtctgcagcgcctcgttgcgtgtctgtctgtcctgccgatccagccattcccgcaacgggtccggcaacgcgtcacgtacccggctgttgggccaggacgcgggcttgttgcacagcagcgccaactgcatggacgggtcctcgctgttcgtgctggcctggccgtacgcccgaggatgggtcgccagatgcttgcccgacgagtcgaggacctcgacctcgagcgcgcggaggcccacgatcacccctctgcccgcgttcgcccggtccgcggaataacgatgccgtccctcgagcgtgaccacgccgtaccggtcggccttcatatgccgccacgtgaccacgtcgaaacgcttcccgggcaacggcagcagcgccgcacggtcctcggagaacaggccacgttcctccgtgtccttgcggtaatgcggtttcgtggccagctccaggcaccggtccggcagcccggcgttaaagttctccaggctccatacgctcggccggggcacgaacagcttgcgccgcaccatgccgaccttggactccaccgcgcccttctcatgaccggaatacgggttgcagaacgaacaatcgaacccgtaatgcgcctggaaggcctggaacaggtgcgtcaggcgcggctcgcgctccccgtaccccttatggcccacgccggcggcgttatcgaacacgatccgctccggcacaccgcccagccactcgaacaggttgcgcaacgccaggcacgtgcactcagcgttctcgcccggcatcaactgcaccagaccgacgttcgaatacgggaaatcaagcacgaaatgatgcatccgctgcaccacgccgcgcaacagcacgtcgacctcgccgaaatcggcctgcgcctcgcctggatgccataccagatccatgaacgcctcatcacgctccgccgcgaacccgcgcccgggccgcgccaccgcccgcgtcaccgtggacagggagacctccgcgccatgctcgtccctcaaccgctcccagatcctggtcgcggtatgccgctgcttgcgccagttcgcgcgatcctccgcgagccactgctcgatcacgggcagatacgggtcgatcaccgacgcgcgcggctttctcaccgacggcacggccgacagatcctccttcgcgaggtacttacgcaccgtcggctcgctgacatgtgttttccgcgcgatcgacgcgacggattccccgttccgccgcaaacgacggatagactgtacttggggcatgctgatcataatcctttccggtcctttctggcggagatacaagcaccatccagttaagaccattccgtggtcggcatgctctgcctaaacccgaaaaatcatcgtgactaaacccgcaacaactaattgaacacaaacagcaggagccgcaggctgttcgcccggctcgtcgacgacaagagcgcgtccgccacggccagggccgaatacgagatcttcaaggacatcccgccggccgcgcgcgtcgaccgcacgtgggacaacggcacggaggcgagcctgcacatgctggtggacgaggcgctgggcatgctcacgtacttcgccgacccgtacagttcctggcagcgtggcagcaacgagaacaggaacggcaggatccgccgctatctgcccaaaggaaccgggttcgaggacttggcccaggaggacctcgacgcgatcgtcggggagatcaacgacacccccatgaagctcctcggctacaaaacgcccaacgaggtatgggacgaggagatcgccaggctacaatcgaaggcagccagcccgaacacaagcgttgcacttacaaagtgaatccgggcgggcgtccggtagtacagcacgcgcatgggacggttgtcggcctcgtcgacaatctcccgcagttccccggccatgcccatccggatctcgctgcgttcgggcagataccggcggatcatgccgttcccgttctcgttgcctccccgccgccggctggagtacgggtcggcgaagtacgtgtccatgcccggcccgtcgcgcagtcgcgtgtggcgggcgaactcggtgccgttgtcgtgcgtgacgctgacgcgcgcgccggccggcagcggcgagaacatcgccagccgcgccccgacgctttccccggcggtcttgtcgggcacgatcctggccatgaggaacctggtcttcctctcgacctcggtgtgcgggtagcatccggcgccgatcacgccgtcggccttccaatggccgaaaccgctgcggtcgccggcctccggcggacactcggagatgggaacccgtccgggaatcgggaaacgcgacgtcctcccgccgccacgcctgcgccgcctcccgtggccgcgtggaaggcagcgcgcccagcgttcacggcgacggcggtcggcgtggatccaacggcagacggtctccgggcacacgcgcatggcggagtcgtcggggaacaggacgcgcagcctgccgctgacgggcggcggcgaccagccgcgacccagccattcggccacccgcgcccacaggcgttcgcatgacaggcggtagcgcctgcgcggttcggcgcgcctgcggccggccttgcgccgcggcggggccggcgatgtagtatccgcccgtccacgggcccgtcttcagccgtttcggccggtacggccggtaggactcgttctcgttggacgggaaccacgtgtcgcgttcgatctccctgccgaccgtcgaggcgttgcggccgagcatcagaacgatcccgcagatgatggcgccgttgccgacctcgatccggatgacccggcgttcctcttccgacaggtgcgaacatgcttcccccccccataggtgcaacatcccttcggactggttatccggacaatctccaatctaacgggtgttgcactttcaattagacaacgggcaccctgcggaaacagtggaaaccccagacacgccgcctctcttcggcgtgtcgcccttccccacccaagaagcatccctcatcggcgcggcatcggtgccgggacaacaaaaagctaacgaaccgtgcgaccgtgaagcaaataccctcccccggcatggccgacggtcggcaacgaccacagtcgcagacccgcatccaggcaagaaggcattcgtcgtctgcgcgtatggcgcgttgagcctgatgccatgacaaagaggggcgcgatggcgcttacaacgccatcacacccctcaaggaagttgcatcatctagcgtaccaatgcggcaccttgttcccggcacggtactcgcaaattatgggcgtcccatcggcatccgttctttgctggccgacttcgctcttcttgcagtattgtccacgaatgttgtgtcctccggcgtttccgccggtgcccgaatcggtattaccgacatatcgaccggtcacggaatcaaacgttgcatacgagttccattcaggcacccatgcgcttccatgtgccattgcgcccgtattctgatcgaaatagtagtaggcaccatcctgataatgcagccccttcaccattttcccggtcactcgatcatagcggacccacttccctccgtttgaacggacataggtatcaccgtgatacatggcacccgtggatgcatcaaacaaataccagcccgtgtgatcgccatcgtaattcacgaaggtctcgccatgcgccatcctgccggtcgaccagtcgtaatacacccattttcctccattggaattgatgtacttcatacctttcgccatcgcgccagtcgtctgatcgaagtagtaccagccgccataccggtaatcctcacctttgatcatatggccttcgccgtcatatctgacccatttgtcctcagaagagagatagacatccttatcgtgagccatggttccatcagcatcaaaccagtaccacgcatcactattcgggtcatacacttccttcgaccgcgccatggtaccggaatcaaaccagtagcgttcaccattctgatacacccagcccgtatagccggactgcgatgccgtcgctagttcttccgcatcggctgcggcaatgggggcggcaaacaatatgaaagccgtaactgccgcgataatcccgcgaacggttttcttcgtcatgataaccgcgatttcctttcatcgaatacactgcgtacacgtttgcaagagcacaggcgcaactcccatgccgctctacacttaccacgatatcctaccagcgtcggacttcgttctcttctatccagaagcgccgacaatcataaggggtgcataattcacatgaaaaaacacagaagagctactccccacaagggacacgagcttggctcattgccttagaccgtcacaactgacgttgcttgaccagctgaggatagaaccactcattgatcaccggaacgcgatacagcaacgcagcaccgacaagatcgattggcaaacgtacgataaagctcaataggaccagtggcacatgagggaaagccgcgcgtaagaagccaagatacatctgccacggcaatacatcatcttcgacaagatgcacgcacaggatggctagactcgcttggccaagcttactgagccccccccccgagcaacatatgatccagcaactgagaaacaccgatgacgcatagcgtaccagccatactgccaaccacagccagaacagggtgcgacccataatcattcatggccatactcatgccgtcgaaagaaacaacgtcgattatccagatcagaagagcagcaacccagatataaggaatgcgtttcacgcgaccaagcacgtcatatttcttcgcaagataaccaagatatagaaatgcaaccgcacacatccccgattgcacactccaaggcaagcacacatatcgtgatgaaatatatccaaaagcaaagcatgcagccacccagaacactgtatggggaagcttggcaaaaatatgcagcaaaagccgagcccaaaacatggccagcaaaaaccaaatcgcgccaatacggaacccaaccggccaaagtgtcaggttagacacgtcaccgttgccgtacaatgcagtcattccccatgtttgcaaggcaagtgcgcgactctcatgatggagggtcgccatgcaggttacaccaacaagaacacataacgcggttaccgcatatgtgcacaataattgtcttgattccttcacccaacggaatgcacgttctggatgcataaaataaccggcaagcataaagaaaagcggcatatgaaaagaaaaacagagcgagatagcaacctgtgcggccctatggggaatacaaagattggcctcaatcgcgctatgccccagtatcacagccaatattgcaatacctttggcaatatcaaaaaatctaatacgttgcatacgtcataaaccaatcacagtagcgaacatgcctgcaagcacaggtaaatgcaatgaagagaatacccagcagaaaacatatccacaattatgagaacctgcccctaatggtattgccgaagcaaatgagactttgaataccataggccgcgaccggaagcagcaatatgaagaacggcagggtgtaaatccctttcgcctcccagaacaggtaacaaaggaagccgccgataaaggaagcgcatactaaaactcttgcataaatctgggacgcatgatcgccaatcgccttttccctcatcatggaatggataaggccgatcaatcccaccaacgccagaagatacacaaccgtttggaaaacattctcgtacctgagcaggatttccgaccctcgtcctatcagaaggaacgaacccagtccggaaaaatgccgagcggaatcacctatctccgaatacaaagacgtcataaacgagggctccgaccactccgacgcgagtttccccaagaaaaagcgcaatccttccttcggagattccataaatcccatcaccctctctctgatgaaatcctttgaaatctgcgtctgaagggcatagttgttacctgtttgataaaacgcatccaaagagaatctgctccaccatccaggcggcctagtatccgggctccccagtccgagggcaatccatgaaagcatcggcaaccccttgccgaaattctctccggtccgagcctgcaaccagacagttggcagcttggaagaagcatacatcaccagagcggagaccacggaaaccggcagctgccatatgcggcggctgttccagaccgcaaaaacaaccgccacgagcaccgccagcaccactatctgatatgttgtcttgaagatggtgccgattccacagatgaggaatccgacaacaatcgtcaacgcactaagccagaccttctgcagacgaagcccttccgcaatcacccaagcaccgcatatcgcgataaagaaaccaacggcgttggggtacacgaaggctgaaaacatcagcaggggcacgcacatcgacactagaacaacgaaagccccatgccctcgttcatccaagcccagcaagcctcccaaacgccacaagaccgcaaccagtgcggtgatagagaccgcgcttacgatctgaaaagcaaggatattgtctgttccaaacagcgcaaacactatgagataccacagcatcggtccactttggaacggataatagctaaaatacgaataggcgctgggaatgcttcgaccgacacattccgcctgcgtggcacccctcgcgcaatagctttcactaaactgcccgatatctcccttgagcaggatatcggcggcatccatcagacttcgcgaatcctgatacgtatatgacaccagattcagtgatgtgagccagatgatctgcatcagcatcacatacgccaagagcgcgatcaaagcccatcgtttaggtaacttggaaaccacaaccgcaagcacgacaattaaaccgcatagcagaatcgaacccagaagaaacgctatcgaaggtgcaccaaaatgataatcgacctgttccgtaatactgccgagctgcggactggctcttttaaacgtcacagtgaagcaaatcgacaacgcaagcaacaacaacacgatggcaacttgcagccctagggcaatctcaacaagccaccgcggaagcacgcagccgaaaaacgatcgctccttatgcgcttttctttgtttaaccattacaacgatatcccttatacacccggaatattcacttcattacagcgttgtttcaacgatataccgaggacgagccttgacctccaagtatattttcgcaatatattcaccagtaattccgagcgcaagcaaaatgaaaccgcctaaaatccacatagaacacatcatcgatccccagccggctacagcatgccctgaaaaaacagagacgagagtatagaccagcattacgattccaacaaacaccgagaacaaacccaatccggtaatcatcgtcaacggcttcgtcgagaaagaggtcacaccctccaccgcaaaagcaaccatcttccttagcggatatttggactctccggcaactcgcgttcctctcttgtagtacaccttggccgtcttgaatccaagcgaaggaaccaatccccgtaggaacagattcgattccttgtactgcgacagggcctgcaacgccgtccggctcatcaaccggtaatcggcatgatccggcacggtctccgttccaagccacttcatcagagcataaaacgcatgggccgtgccccgcttgaacgcggtatccgtttcacggttgtctcgcacaccataaacgatttccgccccttgcatatattcctggaccatagcgtccacggcatcgggatcatcctgcaggtcggcatccatggaaaccgcggcatcgacatccagactaagcgcccgcatcaggccggcgaacagagcattctgatgtcccctattgtgggcgagcttaacgccgtggaacacaatggaatcatccctgtgcagaccctcgatcacgttccatgtctcgtcagaagaaccatcatcaacaaaaatgacgatgctgtccttggcgatagcatgagaatcctcgagctgacgaatcttcgtcttcaacgcaccagccgtcacatgcaatgccgcttcctcgttatagcaaggaatcacaaacgccaacgtcggctcacgtttcacgcgggaattctgtccgctcatcttcacatcactcgtcatgcttgcagtgtataccacaccgacaacccggccaagaaggcttctacgactttgccaacaccgtccgcttttcggctggagcggtattgctgtgccgcacaagaatcgtgcggcacagtccgttcacgatagccgcttatttggtgagcagcggggcgacttgctcctcgtaggcggtcagggcggtgtcgatcacctggtgcatgtcatagtacttgtaggtgcccaagcggccgccgaacacggtgttcggctcggccgcggccttggcctcgtaccgcgcgtacagggccttgtccgcgtccgtgttcaccgggtagtacggttcgtcgccgcgctcggcgaaacggctgtactcctcccacaccaccgtcttgtccggattctgccgctcgcgacgctccgggttgaagttcttgaactcgatcgcgcgcgtgtacggcacgtccgcgtcggagaagttcatcaccgggcaaccgaagtggtcgccctcgtcgtaacggacctccttgaagtccaccgtgcgccacttcaggtcgccaagctcgtaaccgaagtaacggtcgaccggacccgtgtacaccaccggcacgcccgcggccttcagcgcctccttgttgtacggttgggactcgtcgaagaagtccacgcccagcgaaaccgtgatgcgcgggtcatcgatcatgcgctccatccacttggtgtagccgtccgcgggcaggccctcccacgtgtccttgaagtagcggttgtcgtagttgaagcgcaccggcaggcgcttgatgatggccgccggcagctcggcagggtcggtctgccactgcttgcccgtgtagttcttgatgaacgcctcatacagcgggcggccgatgagctggatgcccttgtcgttcaggttggccggatcggtgccggccagctcgcccgcctgcccggcgataagcttctgcgcctcggccggcgtgtaatgcgcatggaagaactggttgatggtgcccaggttgatcggcagcggatagacctcgccgtcatgcgtggcatacacgcggtgcacgtagtcggtgaacgaggtgaaacggttcacgtactcccacacacgcctgttggacgtgtggaacaggtgcgcgccatacttgtggatctccgcgccggtctcctcatccatatacgagtaggcgttgccgccgatgtggtcgcggatatcgatgatgcgcacgcgcgcgccggtgtgctccaccgcctgctgcgccaccgtcagaccaaacaggcccgcgcccacgaccaccagatcgggatactccaccgcttcagtcataagaacaaccttccaaacagtaatcacacaaaaacaatgtgcattcgcacaatcatattacccgcatacgagtatgtgagccaaaagaacttacttgtctccgaagatatgcgcccacgtctccatggaagtaattccataggactggtattgggcagccaaacacttccaattcttttcaatccgacgagtaagtcgataaccttcaagcatgcttttgcggaaacgcctgttgtcgcgcttcaaccatgccaccccattaccgtctggcgtggtcaccaatgctgaattgacatggtcaaaagcaagccaagtccaagcggcatcccgtgccggaatggctgcatcaggccgaacggctttatctggattggcgtttttgatgaagctcttggtaatcaaaccgaccgcggccttatatcggctcttcatggtcgaaggatggttcttcggcggctcgacctcacccgcaggctccgggaatgcttcgaaactgtcctgagcctgagcatcaggatatctcgcacgcacttcacgaacttctccaagtttcgttggcaaacaatccacaagatactgaggaccacgaagaatatcccgtaacgccatatgatgcaacgccatggctgaatacacgaaacggagtcccaagctggcatcgccatacatggtctcaatcaacatacgaggtgccttatccggatatgtcagcaatgcggcaagccaacggttacgttcggtgaagtattcctcccaagagcgggccggatccttgtcatgccacgcctgatgccagaccgccacacctggcaggcagactgtgggaaatcctgctttcttggcacgaagaccatattcaatgtcatcgaatttgatgaacaccggcatggagagaccgattttcttcacaaccgcaatcggaatcagacacatccaccacccattgaagtcttcatcgatgcgctgatgacgatccggagagtcacggagcggttccacagagaaatcatggttgtatcccatgctcttggacgggtacatccacattcgttgcgcattgatccgctcaccttgcgtatacaacatggtgcgattatccaaatggaacatgccgccgccgacaagaactggtcgcaccgtgtaatcagagaattggattgcacgcagaatcgattccggttcgctgatggcatcatcgtccagcaacagcacaaaatcactatcaccggccttagccgtttcatacatgcctcgggagaatcctccagaaccacccaagttcgcttgctgaatgtatgtaagctgttcgcctagattatcggcaacctcatcaaagtctttctgatccttaactaagtcgctgccttgatccgtgcaatacactgtatccaaacgttcgcgcaatgccgaagcaccggcgatagtacgcaattgatccatgcaatatgaggcgcgattaaaggtcgtgatggcgatagacagggttgtctcatgcttagcggtacgcgcctcacggggtacagaccatgtagcatcagtaatggtcacggaaccatcaagcgattccgcatcgaaccagaagtaaccaccatccataagacctgtcatcggcacgtctatgcatacacgagtttcagactccgaagccgttgtcgtcttcatcgcaaccggataaatcagtccgcgacctgtggaacggaatacgctgatcttggcatttccccgaacggccgcttcgaatctcaccgttttcacactggtccagcgacgccaataggccgcagggaacgcattgaagaacgtgcatccggacatgtgcccacgatctcgcagcgctaaggaagcacgtcccgtgatttcgaatgaatcgcaggaaactctgtcagagaatcccgcattccgcagcatgcgctgcaatgtggactggttcatggaaccgaattccagcctacgcatatcgatgcgagaatccaacgtggtctccgccacatgtggacgggtccagtcaatcgcatacagcgggagagtctgctcagcatccttgaccggatacacgacacgcataaccgtttcccaagtattgcccggttcggcattcttcataaaagcctcctgattcttgcttcctcccctatcaccgttttcgttcattcactcatcgtagtgggtgcatcacactttagacaatccacacgctcatagtcagcacacgaaattcttcgggaaagtcagcagcatatcgatgatgacggcacacttaccgtctgcgaatgctacaacggatacattgtccaacagcgcaatgcagctttctaatttcccctcatcttcacttctcttctttgaagacacatttattcaataaacaaaggacctgttgcgcaacacacccaaccggagcattgcagccacgtccgcgacgacggacggcataagcctttacggacagctatggacgacccccgtgtcctcgcagtatcattgagacagctcccggcatgaggcgtctcggcggattctagtggtggttgcaacacctgaggtttgagcggccttccatggccacgttgtcggttgttgaggttatcacgcgtcgtcgagcagttcgatgatcttctcgcttggtttcatgaacccgagggttttgcgtggccggtcgttgagttcctcggcgaccgcgtcgaggtagtcctccgggtagacggataggtcggtgcctttggggaagtactggcgcaggagcccgttggtgttctcgttggtgccgcgctgccacggggagtgcgggtcgcagaagtagacggccatgtccagcgaggcgccgatccgtttgtgcagggcgagttccgccccctggtcccaggtcaggctgttgcgcaggagtttgggcaggtgctgcatcttgtcgatgatggcctgctggacgtgttcggcgtcgtgcccgtcgggcaggtgcagcaggatcgtgaacctggtggtgcgctcgacgagcgtgccgatcgcgcttttgttgcggctgccggtgatgagatcgccctcccagtggcccgggaccgcccggtcctcgatctccgggggtcgctccgagatcatggccatgggttcgcggaaacggggtttgcagccttggccgccttggggtctgcggacggttcgcccctgcctcatggcgcgtttcagctcctgcttgagttcacccccggcctgcaggtagatggcctggtagatcgtctcgacgctcgcgtgcatatccccattatccgggaagtccagcctcagccggttggctatctgctccgggctccaatgcctgcgcaacccggccagtatctccgcccacaacggcgtgccgtcggccgccttgcgcggtttggggcgtttgagccggtccgcggccttctgctgggcgcggcagggctcgtaaccgccggactcgggattcctgttgcgctcgacctcgcggctgaccgtgccggggtcgcggcccagcaggcgcgcgatggcgcggatcgaatcgcccagacgcagacggtcggtggtcaggatgcgctcctcctgattgaggtagcgcgcgtggatccgtttgggtttgtccatggtggaacgataccagtctatgcttgccttttcgttcctcccggtggcgcgggtgcgcccgttgcgccataccttgccggtgcgcttggagaccccggccgcatgggcggcttgggtgaagttcatgccctcctcgtccagcagacgcacgtactcctcgcgcctcgccgcgcacatcagcttcctcgtcggatattcgacgccgttgaacgtccaacggcgttccccgccacggtcttcgtttcggtggctcctggtcacctgaccctccttgcggtaggtcaggtgttgcaacgatcactagaacccgcccaagttcctcgtaaatgcaacttacgcagaattcatccgatttgcttaattataagcgcacggtcgcttaataacgcatattcacggttcctgtcatcacgaatcacgaagctgcaagcattatcgtcaagcgcaacgccgaccgcatcggtcgcattgagattgttcggacttggcgcacgaagcgatgtaatcagacgaaattctccattattaaacaaattgagcggcatctcgaaatgtacagtctgatgaccatgtttgtccatcttcagcacctttgagccggtgtcataagtgattccgccacgacggatatcatgcaatgcaatagcgagatagaaatcccctggctcatcatactgatattccacgtcgaacttaaaagtatccgcgctggtacacactttaggagaaaccgcaatggttttcaacaatgggcaccgttcattcaaaccatttggatagccgccacgttcctcttgacgttttcgttcagccttttcctcagcttcaagattggccaaggtatactgttgcgatacagtttccggatcaccgatagcttccactttgccatcggcaatcatcattgctcttgaacaatatttcttaacggaattcatatcgtgagtaacgagaatgactgttttggtcggatctttcttgatttccgtaaagaaatcgtcgcatttgcgttggaatgcctcatcgccaacagcaaggacctcgtcaaggaccaatatgtctccctgtgccttaatcgccacagaaaaagcaaggcggacctgcataccggaagaataattcttcagtttctgatccatgaactcttcaagttcagcgaattcgacgatgtcgtcgtacatcgcatcgacttcttcatgcgtgaatcccagaagagagccatttagatacacattctcgcgaccagtgagttccggattgaatcccactcctagttcgataaaaggaaccagtttgccagaaacagtgatagaaccattttccggatagtaaatctgcgaaataagtttcagcagggtggatttgcctccaccgttccggccgacgatgccgaagaactcaccttgatgaacctcaaaactgatgtctttgagaacttcctgtttcttataccccttgatgcctctggcccaattgataaaagcctgcttaagaccggtagcctgctccgtcggcaacttaaagcacttggaaacatgactcgcagacagaactaccggattcttagagtaatcaacctttttgatggttttttcttcagacattacataacctctgcgaatttgcggctattacgacgaaatagcgttatgccaagccacagcaagacaacggtcagaataaggggaagcaaacgaacaccccaattgttgaattgattccaaatagtcggctgggtgtcaggagcgatgaaattatgacgaatgtcctggattgcctgcgcgaacggattgatgagttccagcctggcaatatcagccaacaatccaccgcgattagtgacatatgtcaatgggtaaataatcggcataccatagaagatcaactgctgaaggacatcccagatatgggcaatatcacggaagtacacatacatcgttgccataagtaatgtgatggcaagcgtcaccgcataaagctcaataatgcttagaggaagcagcacaactctccaagtgaaatggaccctcgcgataagagcaaaaatcagcacgacgataagattgatggcgtaactaatcatcgcaccaactgtcgccgaaaccaccactatgtagttagggaaatgaatcttgcgaagcaaatcgcctcggtcgaccacggatcgcaatccaacgttcgtcgattcggtaacaaactgccacgagctgattcccagcagcagaacgaccggatatgtagacgtaccatccgacatccgcaggaatttgccgaataccacatacatcacgcagaacatcatcaaaggcttaagcaccgaccatgcgatgcccaagaaagatccctgataacggagcttaaaatccgtcttcaccaaaccttgcaggacggtccatgcgtacccgtatctgtcccgcatactcttcaccaactgtttcacaagttgtattctatcagtggctgttcttcaattgtccacagctgccaaatacctgaaattccattacatcaggcatcgcgcatgatgctcaatgttcgttcaataccttccctgatggaatatctcatgttccatcccagagattgcagctttcggccatccataagcgctatggatgcagtggagtaccctttcgtctccagtgaatcgggaagttcatatcttaatccaactccacactgcgaagcaatcaaggaagccaaatccttcagccggtagtccgaagcaggtgccgcgatattgtaggcttctcccgtctcaccttcaagcaggcagtacaatagcccagcaacggtatcggcgacgtacgcgtatgaaaacagttgctcacccttgctttttaggacaatatcttctttcgaaagccctttatgaatgaactgagaaagcgctttgctgtcatctttatgcagagtcggaccatatgaacgagctatgcgaggaataacaaaatcgattccatattgctcgaaataagcacggcaaagcgattcacccaaacgcttagcttccggatagcctgcacgaagtgtattcgaatcgatatatccacagtatttttcgtcaaaacgctctgtgtccccgcgattctgtccgtaaatctccacagacgaagcgaaaataaatctgcttcccctctgccctaactgagactcacgagaatattcaagaagattctgcaaaccaatcacattggacgtaatggtcgaaacaggttcagcagcatacgctcggggatgtgttgtactagcaagatgaatgacgatatctgacggataagatggatgggctcctggctcagacacatccatctgtacaaaactaaaatgcgactcatcgaaataagggaatctgttctgggctcgactcttgttacgcccgattgcaatgatcctgcaatcaaaatgcggatcttcgttcttcttcatcaggacatctatcaggaaagtaccgatcattcctgttgcaccagaaatagcgatggttctacccgtcaacttgtcccaatgaatcggaagattcgcacaatatgccagatcttcttgataaagaggggacttaaaacggtcaggcacgattgactcctcgtcttatttcaaccaagtatcctcgtcagcagtgatataagctttgaatagctccagatcgcccttggtcgtcaacttgatattcttatcggatcctttagcgaagtgcaaggtctctccaagatccaccatcatcgtattcgtatagctggagccatagataccaatatgctcatcaaaagccttacgatatgcagcaagcaatttcccatatcgataagcctgcggggtagaaacacgacgcaattgttctcttggcacatactgcttcgtagttgatgtgttttcttggttaatcacaaaaatctgctcgttatacggcaatgaagtcacggcattaccatatttattgcaaaccgctatcacatcagtcaaaacatcagcatctattaatggacgaataccatcatgaataatgacattatccttctcacggattttatcgacgagatgctcaacaccattcctgatggattcctgtacgcttgaaccaccacgcacaatccacttgagtttatcgatattaaattgcttagcgtacgcttccaccatggtttcccatccttcaatgcacaccacctcaatggcatcgatgtcgggatgtcgctggaaactttccaatgtgtaaatcagaacgggcttatcaaatacattaatgaactgttttggtatgtcctgtcccatcctagtgccagatccacccgcaaccacaattgcaacgttcttaatggattttacttggtccatcctaaaattccttgagacttatcgcttgatatattcttcaataacctgctcatcaagttgggcaagcattttccgatccacgtgttcaaaatgcaaaccgatgtcgttcggcaaggcatatatattaccgtaggcctgcgtcagcaagtacatataatttgtcggtaccggatatcttctactttcaaattgctgagaatctaacgggtagatttcatccaagccgcttatccactcgaatccactcggatgatccatattgtcatatgctcggataatgccagccgccttttcccgagaacacactattccagtcttccgcatctgattaagctgagcatcaaaaacatcagtgataagtttcccagcttctgtttccgccgaaacatagacgttattatcccaagcagcacgaatatgcgaatttgattcagcttgttcgatggcagttttccggtattcctgcactttgacgaacatatcatgactgacatcagccacccaatcgaatgggaacaaatcaataaagcccgggacacgagtatcacgtggggcaaaacgaatttgtctgcaatgcacaatacggtcccaaacaacggtgattcgatactctgaatcgccggcgagaactttttgtagtcgttccaaatcatcacgcatgatgcccaaatcaaggtcatcatcccatgggataaatccgtgatgtcttacagcgccaagcaaggttccgccgaccagccagtactgattaatcccatttcgtctacagatttccgcaaaatcgcaaagcattcgattgagagcagtttgcagtagcttgaggtcgcccccaggctcaggtaatccaaggaaaaaccttttgcgcgtttctaaatcagtctcgttgggaagacgatattgcgcccagaaacggatatcatccttcgcacgctctgcaatctgcgcacgctgcatttcattgaggctcctgcaagaatcctcgttgattctctgcatgccagatatggcatcacgaatctcatgcaaaatcatctcttgcgcctgcaaagcatcacgtagacgattattctcattttccaaggagtcaattcgtcccatcagcttctgcatagaacgctcagacggccagaaaagcctttcacgcaggcgccttgccagagataccataatcttcttccttcattcagtattaaagcaaaataataccgcatatgctcttatgagcatatgcagctaggcttagcggattatctcaaattaatccatcttgagataattcttccaatactcaatcgatgtcaattccgcacgcgcagcagcatattctttacgaagtcgattaatattcgccttgtaatatttgagatcacgcatataacgcttcttaatcttctgataacgctggacatccttagttcgaatggttcctttgcggttgtaccagtccagaactacgagcttacgcttgccacgaatcgctccagcaggatatagccatccctgcagcggaatcaccgcgtatccagcaccgtctttcttgatgtatctctgattattatcagtaatcagatcttcaagacgttccgccaaactacgcgacttgtctccatcgataagctgcctgtcaacgttcttgatgctgaaaccagcgagttcaggatcttggtcagctcgcgactggagagtttcgaaatcaacaagctgctccttgttgcggtttgccgccataaagctttgttccgactgccctggcttcttgatgaaggacgggcctttcaagaaatcttcaaacgcatccaagcacaactccgcgttttcatagccgaatttcttcaactcaagacggatattattgtgtagttcacgcataaagtcagcgccaggagccatgccacaagtcgcttgggcaatcatggtgttacgggtagtctggtagcgttccactgctgcgttatagcgctcgaagaacgacatatgccacacacacaggccgttcatggtgataaatccagtcttacagcgaatgccatactcggcatcgtcacaacgaacgaacacgggaaggggtaggccgttcttctcaatcacggaaatcggaatgcagcaataccaccacgcggcatacatgttgttccgctgccacttggtcggcgtgtacatctcgttgtacaccagatcctcgaacagagtcagacgcaatggcggcttgcaaccggcaaaagtgccctgctgagtcatgttgccgatgtcttcccactggtcctcgccgacctcatagttcagcatcgcaccgctgatcatgtcattacgatgctcgggcttgagaatgcgcagcaaattataagtacgcttgatgctttccggggagaccgcgacatcgtcatccatcagcagaatgttcgtggcctttggaatctgttccatggcggtgatcatgccacgggtaaagccgccggcaccaccaacgttatcgttcggcacgacctggacgcggtttccgctcagcttctcgacatcgagagtacggccattatcaatcacatacatatggaaatgatcggcaatcgaatcaccggaattgatgatcttatccttgaccaggccgatgttgcgttcaatgaacgcttccttcttgaaggtggtggtggacagcaccagctcaacgtcgttcagctcaccatcgatgccaagctcgtagtagctgttacgaatggcgaccgcaccctccgtcttgatgaggaaaccgacaatcaccatgtcatcggtgattgtaagaggcagatcgacaacctgccagtcatcagaagcgctcagtaccttcgaagccccctcgacaggcaatggatcatgtgcgaaagcatcacccatggtctgttgcacctcacaggcagcacccttaagctcaagatgcagcatgaagcttgttgcacttgtgtacttccgcagcttcattacggacaaggaattgaaatacgtgctgaagtcgaaggtccccgcattaaacatcttccactcgccaaattgttcgtcgaaaacaacaggctgatcggaacggcagtacagcgccgggtaagcgacagagcgagggttcgtttccagaaggatatttgcgaatttcatcgaaaccatattccatagattagcgtaaacccttgaagagaaggcatacacttctcaaacgagtatttcagactattccgttacactaaccatatttgtcttatgcttcttcttcgtcagctgaggataaaaccattcattgatcaccggaatgtgatacagcagcgcggcaccgataagatccatcggcagtcgaacaatgaaactcaacataaccagaggaacttgaggaagcgccgtacgcaacactcctagatacatctgccagggcaatgcgtcatcttcaatcaagtgcacgcacaaaatagcaagacttgcctgaccgatgctgcttaacgcacttcccaacaccgaaacccgatcgatcaactgtgagatgccaacaacacacaatgttcccgcgatactaccaattacagccaagaccggtcgcgaaccatagttattgatggccatgctcataccgccgaagaacatgatatcaaccgcccaaacaacaaatgcgatggcccatatgcaggggaaacgcttcacaaagccaagtacatcatatttcttggcaagatatcccaaatacaggaatgctgccgcgcacattcccggctggatactccagggcagccacacatagtgcgaggaaatatagccaatagcaaagcacagcaccacccaaaccgaggtgtaaggaagtcttgcgagacaatgcagcaacaatcgagcccagaatagtgcgagcaagaaccagattgcaccgattcgtaagtccactcgccatagcgtcagattcgagatatcaccgcttccatatatcgcggccataccccattgccgcgcggggaatccgcaacagcggctcgaccagggccgtcgacaaccacacgcccgagcggaacgagctgatcgcgttgaggaggcgcaaccgccggttggagatggaggtggatgtttcagaacaagcggcgccggtattcgtgtttgtgttcaattagttgttgcgggtttagtcacgatgatttttcgggtttaggcagagcatgccgaccacggaatggtcttaactggatggtgcttgtatctccgccagaaaggaccggaaaggattatgatcagcatgccccaagtacagtctatccgtcgtttgcggcggaacggggaatccgtcgcgtcgatcgcgcggaaaacacatgtcagcgagccgacggtgcgtaagtacctcgcgaaggaggatctgtcggccgtgccgtcggtgagaaagccgcgcgcgtcggtgatcgacccgtatctgcccgtgatcgagcagtggctcgcggaggatcgcgcgaactggcgcaagcagcggcataccgcgaccaggatctgggagcggttgagggacgagcatggcgcggaggtctccctgtccacggtgacgcgggcggtggcgcggcccgggcgcgggttcgcggcggagcgtgatgaggcgttcatggatctggtatggcatccaggcgaggcgcaggccgatttcggcgaggtcgacgtgctgttgcgcggcgtggtgcagcggatgcatcatttcgtgcttgatttcccgtattcgaacgtcggtctggtgcagttgatgccgggcgagaacgctgagtgcacgtgcctggcgttgcgcaacctgttcgagtggctgggcggtgtgccggagcggatcgtgttcgataacgccgccggcgtgggccataaggggtacggggagcgcgagccgcgcctgacgcacctgttccaggccttccaggcgcattacgggttcgattgttcgttctgcaacccgtattccggtcatgagaagggcgcggtggagtccaaggtcggcatggtgcggcgcaagctgttcgtgccccggccgagcgtatggagcctggagaactttaacgccgggctgccggaccggtgcctggagctggccacgaaaccgcattaccgcaaggacacggaggaacgtggcctgttctccgaggaccgtgcggcgctgctgccgttgcccgggaagcgtttcgacgtggtcacgtggcggcatatgaaggccgaccggtacggcgtggtcacgctcgagggacggcatcgttattccgcggaccgggcgaacgcgggcagaggggtgatcgtgggcctccgcgcgctcgaggtcgaggtcctcgactcgtcgggcaagcatctggcgacccatcctcgggcgtacggccaggccagcacgaacagcgaggacccgtccatgcagttggcgctgctgtgcaacaagcccgcgtcctggcccaacagccgggtacgtgacgcgttgccggacccgttgcgggaatggctggatcggcaggacagacagacacgcaacgaggcgctgcagaccctcaaacgcgttgacagggaatccgggtgggcgaacgcggtcgaggcgatgctttccatcctcgaatcgaccggcggggcggaccgcgccggtgtcacactgctcgcggccaggctcgccgagggcgtggcgggtatcgaatacgacgatgacaggccggatctgagtgaatacgacatcgcgttcaccgcggacgtcggcgtgcaggaaggcgggcgatgaacacgaagacggacgaagggctctacgagaaggcccgcaagctgttcatctccaaggcgagcatcgacgaattcgccggctgggccacgccccgccaggtcgacgccgtccaccgcctgctcgacacggaactggcgaacagggaacgcgcgaagcacgacaggctcctgcgccgcgcccggttccccgtcgtcaagggtctcgacggctacgacttcacgaacgtcaggctccccgacggctacatgctcgatgagctcctagggctcggtttcatcccgcgcgcgcaggacctggtgttctacggcaagaccgggcgcggaaagacacatctcgcgatcgggctgggcatgaaggcgatcgacatggggctgggcgtgcggttccatcagaccgccgagctcgtcctccagctgggcaaggccaaacgcgacggcacgctcgagacgatgctccgggacatcggccgtgccgacctgatcatactggacgagttcggctacgtacccttcgacatcgacggggcgcgcctgctctaccagatcatcgcgggcagctacgaaagacggagcatcatattcaccacgaacatcgagttcagtaaatggggcacggtcttcgcggacgacaaactcgccgcagcgatcatcgaccgcatcgtgcaccacgggcggctcctcgagttcaccggccagagccgccgcgtcagtgaggccctcatgttcggcaggaacacctccgcgcaaccggaaaaataaggaaaatgcatgcaactgcctaaacccgaaaaaaatacatgactaaacacgaaacaccgacttgacgaaatacaatcgggatgcgcgaccccttcgacctcccgcccctggcgcgcgtgcggtgccgcttgccgcgaggcaggtaccgcctgaggtccaatgccctgcgcggcttggcgcggatccactggtggaggcattcgtggctgatcctcatatgcgggtcggccggccattcgaccttcagccgtccctcgatgagttcgggtgtccatcccttgcgcagcgtgtccatgacccattcgagcagcgggtcgtacgccatgcgcatgggcttgcgtggctgtcgggcgcgttgttcggccttgtgctgcgcggtcatggccgagtagaacggacgggacgtccacacgcccgccttcagccgtttcggccggtaggggcggtaggacccgttctcgtcggacgcgaaccacgggccgcgtcccggctcgcggctgaccgcggacttgccgcggcccatcctcaacgcgatctggcacacgccgagcccgtcacggttcctcagctcgtcgatccggatgcgttcctgtgccgacaggtgggaataggctttcatatcgagtgcaacgctttctcttcggttgtggacttgaacacttccaaccatagacaggcgttgcacttctacctagaacccgggaaatcagaagccaaatgaataatgagatagcatagaatgcatgcttctggcctatatcgatgagtcacatacgcagcgatgcgatgaggaacccaatcggcacggatatgacgtgtatttgtcggctgcctgcttgccacgtcagctcaagcagctgtcatcgataacggcttagacaacttactggagcaggtgcatcacaaattcggagtacctcgtggcgctgaatttcacggtcagtgcatgttccaatacaaggacgactggaagtgcatgaaaggcatgcacaggcagtcggcaggtatctaccgcgcagcaatgcgaattctggtcgacagcggtgccagattggttatacgcggcgtgcatgtcgggcaactacaggaacgctatcgcgagcacgctcacaatcctcatcaggtgtctcttcaacattgtctggaacgtgtcaatatgattgccgaacaggaacgtgatgacgtgtcaatcatggcagataaagtggcagaccaagctgctcaagaaggtcagattgctcgttatcagctgatcggcaatactgaaggatatttcccctctgatttggcacgcatcaaaatgcctttccagtgggaggattcgcgcatactgtacgggctgcagatgattgacatggctcttttcatgtgtggacgtgcgagcggcatcgatagcgccaagaaattaaatgacggagacaaagccgtgctaaaaatcgttgatgttattcgccctgccattatgccccaatcagcggtctggtatccgttggaaaagagaactgactacggttttataaccgagctgagctagaaatgcataggggccgctgaagcgacccctagcctaacagcgatcataagcccacaggcccacgctcgtcgtattgcaagcttacacatgacgagcaatttaggcaatatccggctgtgtcgtccattacaacgtggagctccatcataaatgtggacacgggttcgaggcttctcatcagatgaagtggctcttccggttttaagcggcatcttcacactctgcgcttgcgaatgcgttgccgggttgcggcggcgcgcgagtcacgcaagtcgtgcaagccacacaacgccgcgctcctcacgcgccgcatccaaatctacagccgtaccttccgcagtagacgctgcacgggcttgagcaccacggtatcggcaatcaccgcaaatagcagcgccgccagcaacgtagcgccaaacatcaacacgctgatacccgcatacgaccatccgtccgtgggcgcgggaatccgcgggccgatcagcaccttggacagcggcgaatgcaccagatagatcgtgtaggagtaccccgccagccagataatcgccttgcgcacccgcgccgacgtgatgtgcacgtcgtaccggaagaacaggaacaccgcggccaccaccatcgcgaacgcaaccgtgagcgtgcggccgacctgcatctgctggccggcgaacagatatggcgtggcaacggtccaggccagggcgaacggcgccaacgcatacaagccgcgccgcgcccgcgtggacggcggatagtattccaacacgaatcccaacagatagtaaaccagcagtccacgccatgggaatgactgcaagaacaccagcggatatccggcaagattacagatttgttcggccgcggctacggctgcggccagcccgaccagcaaccaggctcccgatcggcctatcgtacgcatcatcgcggccaggaacggcgttgccagcacaaacccggcaagcatgaacacgaaccaatagacggaatcgtcatacccggagaacagatcgaacaacgttccagacacagcgccgccaaccgaacgatgatcgatcaccaggtaggcgacgaatcccatgccacccgcatacagcagatacggcacaatcagcgagacaaagcgtttgtagtagtagcgcgcgtacggcgcgaggctaccgggatcggcttggcccgcaccgccgcctgcccgggcatcagagccagagcccggcagacggcccgctgagtgggtgctcaccggccggtcggcatcgaatgtcaggttgaaccggcccgataccataatgaacagcggattgcagaccatgaacagcgcgaacagcacggatcgcgtcacttccgcgctgccggcgagggtcatcttgacgggcatgtagttgttgatcacgtggacgccgatgaccagacacatcgccaccacgcgcagcagatcgtagttcacgtcgcgcggcttgccggcgacgccggaaacggaatcgggcatggtcatcacatggatcccgccagggacttcagatcgaccgggcagctgatctggctcttcaacttgtccaaggcgtccagggcggccgagggatcggaggacgcgtccttatgcgcgtcgttcttgccgccgtccgcgccgccgttcgcaccatcggcaccgttcgcaccatcggcgtcgttcgcaccatcggcgccgttcgtatccgccggacattcatcggtcaccttaccgttggagcccgtctcgacgccatccgcattcaccaccggcgtggttaccacgttcagtggatgtgcggcatcgctgctgacccgaacggtataagcaatcgtcaattcttttccgggctcgatccactgctggttgaacataatgtactgacggtcatacaggctcgcggtgttggtaccccatgaatctatatcagcctgcacagcggtgatttcgccaccgtacggggcggtaagcaccacgcggtacaacatgccgccgagcactggattctccgagccgccattaacgaaatcaggcaacgattcggccttagccttagtcagcgtgttcttcatggtgaaggtgactgtgtattcgtcaccgagctgatcttccgtaaactgacccagatgcgtgttacgcacggctgtcgtgatgcgcttatccagcacgccagaatacagggcgttctggctggccgaggcgtcgccgcaggtttttgtgaccgtggtggaggtcttcagataccaatcctgcttgccttgctgcagctccgaaagatagatgccggcttcgggcacctgactgtcagcagacaactcgccactggccttgtcgtcgatgagtccggtggcaatcagcgcctcctgctcatccggatcagccatccatagcttgaaatgaccgctagcgctggtatctctaattgccttcaacagcggggatgcggtagaggcatttgcgttgccaagcacatggttcataattgcttgagccgcttcggaaacgaagttgttctgctgctcgaagtccgggtaatccgtgtacaggtctgaagcgaagaacggcaccgtggtggtgtcatccagcactcggccgtccgaaagcttgacctcgcctgtggctcccagcaatgcctggagaaatacgggatcgagtgacaatacacccgctacgttctcgtcttcgttgcctttctgatacagccacatgtatttgttcatctgtgccacacgctggaattcggggtcgatggtcgtggtggccgggtactggtcaaaagtgtcaccaaatacctggcgctccttcagcaccgtatcatccattggctcctcaggaatgtcccaaccagaagtggtggcgaaatcaccgatggtaatcgtgcccttatctgccgtgattgcggcgatggtgcccaccatgccgcccgccgaacgcagctcggccgggttctgcaccatcaccaaatacgtgcgcttgccgtcctcgccaagcagttgcggtagcaagttaatgaggccatcgtattcgccgagcatcgaatccacggtcttgagcgcagccttttcggcttcgagcacggtggccaccttggcgacgctcggagtcggcaccttgttgagcttggtgagctgctgcgagatatccttatgcgcctgcttgacgatatccggcatatccatcagggcgctgacgtccaccgagccattcttcagggagaagccctgcaatcgtttggacaggttcagcagatcagtgaacggaccgttgaccagcgtatccacggaagccagcatttcgcgggcggcggtgatgtcgcttccgaatcgcgaatggtcgcggaagaagtcccactgtgggccgttcagctccgcattgagatcattggtggcattgaccagctcttgggagatgtccgacagactcttatcgctgccgcagccaagtgccgaattggccagactttcggcggatgtcagtacacgctgcgcatccgtggccattctcgagacggatgccgcgtagagcgtgcccacacaggtgacgctggccagcaacgtcagcagcagtacaaccaccactcgcgcccatatcggcgtacggctgatcagcgaacggccgttaccacccacgtgctggggagtcttcaggtttacgggacccgtctgctgattcacagcgctattcgtagatgcggagcgattgaattttccgttaccggcatgacgtcttctcctacgccccacagccttatggctcgaatgccctgaagtgaatcgcatacttaccctgcccgaaaatctgctcagctcatactcttatccagcggcgcgaggccacgcttccggatgccagactccgggcaaatccggaatcgcagacatgccggagcacacgtgacgccacgcatatctcatgccagtgtaccgatgccaccgaaataaaccgaggatttatcccataccgggtgcaaatccccgcatgactaccacatcgctgtcagaatgttctcagacttcattgaggggtataacagtattgcgcaagaaaacggtcactaaacgcaacaatagttaaagccgtattgatttgttcggcttaggagaacgggagaggtaattacatgttcgtcctcagcaacgcctggcgggccctgacacgttctaaaggacgtacggccctgaccgcgttcatcaccttggcggtcaccttcggcacagtcgccggactggccatcattcaagaagataccaacgcacacaccaccgcgtacgatcagcagaaggccacgttggccattcgcccgactgcggctacgtggaagaaggtctccgctacggactcggcttccaccaagcattacatgacgtggacctcatacaccgaatacgccacgctcgtccagtcggccaccaactcgttgaacttcacggttaccgaaaccgtgccggcccgcgtgagcggtgatttgaaggccctggacggcggatcgctgggctcggcctccgatgacgagaccggcggccagctcatttggcgagccttctggaccaaggattccgccaaggccagcgacctcggcaccttcgaaatcgtggacggcaaggacctgagctacaacaaccagtcctccaacccgaacaccaccggcgcactggtctctgaagcgtttgcctccgccaacaacctgaaggtgggcgatacgctcaaggtggcggccgcctcggacgccaagaccacggccaaactcaaggtgcgcggcatctacaagtacacatccgaatccgccgtcgccaatccggtgacggccgcccgcaaccgcgagaacgcgattttcaccaactatcagaccttcgccaaggccggactcgacccacagtccaccgacaagaccgtctccggctgggcagtcccggatctggacgtggtgttcgacgccggtgattccgctacatacaagtccttggtgtccaccctcaagaaatccaagctgcccgccaagggttacgagttctcttccccttcgctggaatcctacaacgcttctctggagccgctggatacgctatcctcgcgcgcgaagaccggcaccattgtgttggttgccgtgggcggcgtgctgttgctcatcctcgtgctgtcgggcgtgtgggcgcccaagcgtgacgacgagatcggcatggcactggtgtccggcgtcactcgcgggcgtttgggatggcagttcatgctggaagtgttcatcgtcaccctgcccttctacgtgattggcctggtcggaggcgcgttcgccgccaatccgatcggatctgccctggcatccggccatgccaccccggtgacatcggacctgatttggaccatggtctggtatggactgggttcaatcctgatcctggcgattcttgccgccctgcgccttgcgttcttcagcgcgaacaagctgtttgccgccgatggcgactggggcaccgtgagcgagaccaacaagacgaccaccacaaccgacgatgcggaggcacaggcatgagcgacaggaacaacgatcaggaactcgagaagaccactgacgcaacggctgacgaagtgacttctgagactgagacgaacgactccattgaatccgttccagctgactccatgcagttcagcgtgaccttcgatgacgttgatgacgaaggcactgttgacgatggtatttacagcgcactggcatctgccgaaaccggagaaaccgacgagaccagcgaggccgaagcagacgccatcgcttcggccaacgcatccgccgaagtgaccgagcgcaatgccgcccgcgtcaacgaaacactccgactggccaaaaccgatcacaaagacgcattggccgagcatgcggagcctcagggcaaagcgtccgaacccaccatgacgctggcctcgcgtatcgatcgcgtgttggtgggcggcggttctgacgacattctgctcaagacctacccgaccttcgccctgaacaaggtgacggtcgccggccccaagggcaaggtcaacatcctcgatggcgcgaatttcttctgctattccggacacgcatacgcgctgctgatcagcgacgaccccgattcgggtatcaccgccgacgccaagcgtcgcgcgctgatgggcgtgatgagcggtttgaccacgccggcgtctggcacggtgatgaacaagagcgccaacattgttgagctcgagcccgtggaactgcgcggtcaccgtctgggcatcgtaccgcagctgcacgccgtgcagccgaagctcgacgccgaacaaaacgtgctgtacgccatgaatgcgtccaaccgcaacttcctgaagcccaagccggtgatcgcccgcgaactgctggccaaggtcggcttctccgaggccaccagcggcgtggctgtcggcacattgcctttggtgcagcagcgtttggtggccatcgcccgtgcaatcagcaccgaggccgaggtgctgatcctcgacgagccgacacgagggctgaacgcggatgacgaggtgaccgtgttcgccgcgctggccaagctggcgcacaccggtgacccgaagcactgcgttatcgtgctcactgcgtcgcgcgagatcgccgaagcagccgatacactcttcgaaatctgatgttcagaccatagagccccctgtgattcgtattgccgaatcacaggggtttttcaatgatgcggctcattgccgcgctaatctgaggataaatctgaccgtacgaggcgaaacctgataatcatgaccggatatattcccacactggagcagatcgacgaattgcaccgcaaaatcgcgccgtccaaggcggcgtacgagctggtgcacacgcattgcgtgattgtagcgaccatcggctgccagatcgtgcgccggcagaacgcgctgttcacgcgccgctgcacattaccgaaggacgcggaggtaccgcccaccgcaggcgtcaccggcggccatgtgccgccgcgtctgctcgacgagcatttggtactcatcggcggactgctgcatgacatcggcacctaccgcgtgttcaagcatgacggttctgacggcgaactgctcaaattcagcaagaaacgctacattctgcacggtcttaagggctacgagtatctgctcgacgagggcgtggacgagtccatcgcccagttctgccgcaaccataccggcgtgggacttacgcgcgaggatgtggtgcgccaggagctgccgttgccaccagccgactatgtgccgatgaatctcgagcaggaagtggtgatgtacgccgacaagttccatagcaagtcagtgccgccgaagttcctgcaggtcgaggcgtatacggcccgagccgagcgatttggcggagagaacaaacagcgatggctggatctggtggccaagtatggcgtgccggatattccggcgttggcggagaagtatgggatgcggatgatttgaggctctaggggtctctcccccaagtcagcctgtcggctgacagccccctcgtcagagggggcttatgaaggtatttcagatggaacggagacggtaggtgccgttgcggttggagacgatgatcatctggtcgttctccagcacgttccagccttcctgctcgtagccggaagaggagaccaccacaccggcggagtcgccgttgtcgtcgcgcagctcacggtagcgcatcacacggtagtcggcggcctgctcgccacggccgtactcatcgtagatttccacgatgcgcgggctggtcttctcacgaccggcggcgcacagggcgatgagctggtcctcggactgaatcatgcagttgtagctggacttcgggtaggcttggcgcagttcgcgcacggcctgggccacggcctcgtcgagcgagaagccgaagccgatgtattccagaatcaccgcgaagaagatggcggagtcggaacggccgccggtggagaggaacacgctgtggttcaccgggtatgagcggttggtgacgatgttgcggccattggcgtccgagatatcgccgttgtggatgaagctcaggccgttcgcatagaacgggtgctggttctccatgatgagcggcagattggaacttgccaagcgcaggtgccagatggcaccgcgagacggttcgtcggccagcgcctcaaacgtgctgtcatgacgggccgcgatggtcgacttgtagattcgggtgccggtttccggggtgggtgcgccaccgtcgcgcacgtgcggtgcttcgacgggatcggaaagctgggctacaccccagccatcattgtggatttcagacagttcacggaaatcctcgacattgtcttgccccaacacagcgttgagactcaggttgaagcctgccgtcgcgtatcccagtaatctgcacatggtatttcaacttaccgaaaccgtgtggcgacgtgcggcgaccgttataggcattctttatagagcgcatcagcgccgctgcaaactggtatgttatcgcttctgtttggcggagcgctgaggcttggcggcgggtttgccgttctcggccttgcccttatcgcccttatcgccctgctcagcgggcgcatcggcggcagcggcctcagcggtcttccgcgcctcggccgatacggcggcatcaagctcctgtaccaatcgcccaagcccggacgtggtgtccatcgggtcagggacggcggccgggtcggccactgcacgagtcggcgtgggcgtcgggatggtcttggccgtatcggtgcgcttcagacgcggtgggcggcgggtggagacgaacagcggctgcacctcgaccaacgggttgtaaggtgccagaccgaaccacttaaccggcgagccggccatgtggcggattgcgtacttggcttgcaacgacagggcaccgcgtgcggaaaccttggattccggcatcagggccttgtgaatcagcacgtaacggatggtgccgatgtccggatcggcgtcgaccttggggtaaatcgacttctgcttaggcagttcgccggttttggacaggtcgtgcataatctggtggatgtacgccgggatggactgcgaaaccttgaatcccaaacggaagcgcacgcggtagatgtagttcgtgccgaagtcctccaccgagtattcacgggtgaacggctcgtcggtggtttccacgctgactgcccaccaagcacgggcgcgcttggggtggtcggcgaagatggagaagaagatgtccgtgtcgagtcgcttggtttccgagtcggaggtcaggtacacgatgttgtccgcaaaatacgggatgcggaaatcactgtgcagcttgtcgagcgcgggtaggaagtcgttgggccgcatgtgacggcgctgcgcacgttcgagcttggtgccctcattccacgtgtacatgacgaacagaatcgcggcggtcagcagcatggtgaaccaaccaccatgcaggaatttggccatagacgcgatgaagaacatggcctgaatcgccaagaacagcacggtgaacacgatggcaccgacccgcttgccggaatgccataggtggacgccgagcaacacggtggtggtgatcatcgtaatggtcaacgccagtccatatgcggcagagatgtgttccgaatccttgaagatggcgagtacggccagtgtggagacgcacagcacgccgttgaccaccggaatgtacagctggccacgcgtgcgggccgggtaccgcacctgcagatgaggcatccaattgaggcgggtggcttcggagaccatggtgaacgcgccggtaatcagggcctgggaagcgatcacgccggccgaaacagacagaatcacggccagataacgtacgttcggagacatcatctggaagaacgggttgagtgactccatcgcagtgtattgcgggttatcgctattggccagcatccacgcaccttggccgaagtagttgagcaccagcgcaaccttgatgaatggccaggtgaagtagatgttgccgcgccccacgtggcccatgtcggagtacagcgcctcggcaccggtggtcgagaggaacacggtgcccataagggcgatgccggcagcattgtgcgggctgaacaggaatttgatgccgtacaccgggttcagggcctcgaacacagaccagtcgttagagagattcgtgacgcccacgatggcgaggaagccgaaccagaccagcaccatcgagccgaatactttgccgatgctttcggtgccgcgcgactgcacggagaagagaatcacgatgatcacgacggtgatcatcagggtcaggcttgggttttcgtcgaacaacccttccaatggcggcagggtctgcaagccttcgactgcggaactgatggaaaccgccggggtaagtaccgaatccgcgaggaatgccgcgccgccgagcatggcgggaatcgcgagccatgcgccgtacttgcgaatcaacgagtacagtgcgaagatgccgccttcgccattgttgtcgatgcgcatggcgatgagcacatatttgacggtagtgatcagcgtaatcgaccagaagaccagcgacagcatgccgagcacggcctctcggtctacgctgccaagccctccctgaccggcaaggaaggtctgcgcggtgtacaagggcgaggtgccgatgtcgccgtacaccacgccgagcgccacgattgccatgccccaggtgaccttgtctgggctggattgcaggcgggcccaccatcgaccgaggccgcctttcgaccatgcgctggcgattttctcggcttctttggtttcagcttccctctgcttggcgagtgcctcgcgctcctccttggtgagagtgcggcgggacaccttgggagcgttggtaaaggtgtcggccctcagcagtgcttcttcttcctgtcgggccttggctttggcggcgccagactgggctttctgggcctttgaggctttttgggcacgtgcggtcctttggttcgactcagccatacgttcagtcctccattgaggtggagatcatccccctcgcttatgtcaaacacatcatgatagacctcgttcacaattctgacaaattttacaagtcaacacatcgtctctacacgcgccgcgacggccgcacacccggccctcacagtccgtatacggcgcgggcggtatcgcgggtgccgcgcgccacatccgcgatgggcaagtcgagcgtatcggccatggcccgcaaggtgtagggaatcatgtacggcgcgttggtgcggccacgatacggcatgggcgtcagatacggcgcgtcggtttcgaccatcgcatggcccagccccacaatccgtagcgattcgcggataccgtcattgcctttgtagctcacggtgccggagaagctcagataccagccatgttcgcgcgcgatctcggccatctcacggtcgccggaatacgagtggaatacggtgcgttcgggcgcgccgtcggccagcagggtttcgatgacctcgcgatgggagtcgcggtcgtgaatctgcatgggcaggcccagttccttggccaaggcgatatgcgcgcggaaagcctcgcgctgcagttccttggcaccttcgccggtgcggaagaggtccatgccggtctcgccgatagccaccacttgctcggggtatgtggtggcgaggcgatgtacttcggcgagcgcgtcctcgaaagacgtgtcatggtaaggcttgtatttgaggggcagaccatccggccccggcacaccgcgatgcccgtggagcacggactcattggggtgtattgcgagtgccgcgtgcacattacctggatgatcgagggccatctggacggcggtcatcaggtgcggcagctcgcaaccgcagtcgataatacccccaatgccgacagattgcgcctgcgccagcaattggtcgacgtcgtacaccgggacttcgggctgccccttctcctgcgcctcatggctcatagcgcgcgcgaaagggattacggaggccacgtgagtgtggttgtcgatggtctgggcgtcgtccggcaatgcttcaggtgccggggcccagctacggtcgcgatggtggtgcttgctcatggtttctcagtgtaggctgtttctcagtgtaggctaccgccagcaacgctcgtaaggcagtccggtaagacgttcgactacacgacgggtatcgtcggtcgcgtccgcctgaacttgccgtttcttgccacgagcgcaacattcccgggaaagtaacgcaaccggcaagcgagacggtcgccatcctgccgccttttctgcctcatcagcccattttctgcctcattttgataaaatatgaggcagaaaaactctcagaacatggagaaaagcggaacactaccggcatatttcacagtgtttatcgttaccgataatgccatcgcgaaacatacctaaagcaacatctcgtcactcttccggcgctccgctggccacgcgaatcatcgcgtactgggactcgtagaggcggtagtacgcgcccttggcggcgagcagctgcgcgtgcgagccgtgctcgacgatctggccgtgatcgatgtagaagatctcatccgcgttctcgatcgtcgacaggcggtgcgcgatgatgaagctcgtgcgccccttgagcagatgctgcaggccggcctgcagcgcctcctcggtgcgcgtgtcgatgttgctcgtcgcctcgtccaggatcaggatacgcgggtcggcgagcagcacgcgcgcgaaggcgatgagctggcgctggccggccgacagggtcgatccgcgctcctccaccaccgtgtcgtacccgtcgggcagttccatgatgaactcgtgcgcgtgcacggccttcgccgccgcctcgatttcctcgtcggtggcgtcgagcttgccgtagcggatgttctcgcgcacgttgccggagaagatgaaggtgtcctgtagcatcacgcccatctgccggcgcagcgatgcgagcgtcacgtcgcgcacgtcgtggccgtcgatcgtcaccgagccctcggacacgtcgtagaagcgcgacagcaggttgatgatcgtcgtcttgccggcgcccgtcgggccgaccagcgcgatcgtgcgccccggttcgacgtggaagtccacgaggttgaggatgttgcggccgtccttctcgtagcggaacaccacgtcgttgaagtcgacgcgcccgcggatctgcggcaggtccgccgcgtcgggcttgttgcggatctccggcgtgacgtcgagcgtctcgaagatgcgctcgaggtacgccgagcaggtgatgagctggttgtagaagttgccgatgttgatcaccggattccagaagttgttcgcgtagccgacgaacgcgatgagcacgccggtggtcacgttcacgcccccgaagcccatcacgccgacgaagtagatgaacgagatggtcatcacggagatggtctgcacgcccggccacatgaggaactggatgtgcacggcgtgcatccacgcggaacgcacctcgccctgctgctcctggaaggtcctgaactgggcctgctcctgcgcgaaggtctgcgtggtcttcacgccggcgatcgactcgtggatgtaggcgttcaggttgctctgcttgttggagagcttctggaaggcgcgccgctggaagatctgcagcacgcgcacccagatgatgagcaccgggaacaggatcaagctccacagggccagctgccagtcgatcacgaacatcacgatcagcgtgatcacgaaggtgaacacgtcggagatcacgttgatcagaccggagctcagcgtgtccgaaagcgtgttcacatagttgaccacgcggatcaggatcttgccgtgcgggcgcgaatcgaagtagctgaagggcagcgtctggatatgcgtgaagatatcgcggcgcatgtccttgagcatgagctggccgacgcgcgtgatcgccaccgtgcggtagcgcagcccgaactcgtacagcacgatcagcgcggcgaggattacggcgaggatgccgagcttgccgaggtccttgttcgggatcgcctcgtcgatcatgatcttggtcaggtacggcacggcgacgacgatgcagctcatcgagatgacgacgacgagaatgcgcgccacctgtgccatatacggtttgagatatttgccgacgcgagcgatgtcgtggaggtcgatggactcctccagctcctcatcctcgcggaatgtattgcgttgtgccataagtcctcttctaaaacccctgtgcggcgccggactggagtccgagctgcttgtggtagatgtcccagtagcggccgtgtgcggccacgagttcggcgtgggtgccgcgttcgacgatacgtccgtgctcgagcaccagaatcaggtcggaatccttgaccgacgagatgcggtgggcgatggcgacgatggtcttgccgccgtccatctccttgaggtgcttctggatctccgcctcggtctccatatcgacggccgaggtcgtatcgtccataatcaggatcgacggattgtccgcgagcgcgcgggccagcgacaggcgctgcttctgcccgccggacaggcccacgccgcgttcgcccacgacggtgtcataaccctgcggcatcgacctgatgaaattgtccgcgccggcgatctgggccattttctggatatatcggtcgtcgctatcatcgctggcaccaaaaccgatgttgccgccgatggtgtcggagaacaggaacgtatcctgcgccacgatgcacacctgcgagcgcaaggtggccagcggccagtcgcgtgcgtcgatgccgtcgatgagcacatggcccacggtcgggtcgtagaagcgggagataaggctgacgagcgtggacttgcccgcgccggtttcgccgaggatgccgagcttggagccggcgggcacggtgaagtcgaggtccttgaggatcggggtctccgggtcgtccgggaaggcgaagctgacgtggtcgaagcggatgtcgcccttgatgtgcagcgggcaggacttgcgttcggcggactgctgggcaccggatgttccggaagccccgggcgctccggtagcctcatcatcgtgcttgacttgctcgacgatcgtgaccgcctgcttgacggcttcggccgcgtcgggcttctccacgatgcgcggctgttcggtgagcagcttacgaatcttgatgcagctggcgttgaatcgctgccagtcgttgatcagccagccggactggcgcaccgggccgtcgatcatccacaggaaggagttgaaactcaccagattgccgagggtcatgtagcccttgatgaccagaaagccgccgaggccgagggtgatgagctgcagcgagaagccgaggccgtccagccacggcatgtacttgcgcgagttgtaggccaaggccatgttgcactgcatgtaatcgtcgttgtgctcgtcgaacttttcggtctcgtacggttcgcgcacgaatgccttgaccacacggttgccctcgatgttctcttcgaccatggagttgagggaggccagcgagttgcggatggcgaagaacagcgggtgggcgtgcgtggacaggccgcgcgtgagcacaaaaatgaacggcgtgacgcaggccaggacgagcgcgagtcgccaatcgatggcgaacatcacgcacagggcgcccacgaacatgaccacgcagtcggcaatctgatagctcacccaactcaggcagtggcggatcgcgtcggtgtcggaggtcaggcggctcatgatgtcgccggtgcgtgtgtggttgaagtacgtgaagtcgagctcgtgcagcttctcgtattcgtcggagacgaggcggtagaccgagttctggccgaaacgctccatccacatctggtagccgtatcgcgcgcccacgcggatgatggtcatgaggatcatcagtccacacagacgtggcagttcgtcggcatgtccgccgacgatgacgcggtccacgatgataccggacagaatcggaatggtcagggccatcgtgttatttgcgatgaacagtagaagcgcgcctaccacgcggggcaggtctggtttgcagtatggcagcacccatttgagattgcttgcgctggtattgattcccggatcgacgtacatgtgaggagatcaccgtttcttggggattgtttgcttgtggtatggtgcggcatgctcctgcgccgcacgcggcaatcgctgccgccgcgattcacgatcagccgtgcttcgcactgcgcctgtcattggccgcatgaccgaagctctccttcatcggtcgaagcacgttcgactttcgcaaacgcgtactagtctaggcgacctgcgtctaatcgcaacggcccgcaactctgcgtgttccccgcattagcaacgatacgcggctctctaagcgcaacattccccggaatgcgtcgctgcacacctccgaacaggtccaattcgcaacgcattcccgggaaagtggcgcatgtcatatcacgctcaaacaacccagcatagtgagtggctcattcacgttttacgtattgtgcgacggaatcggcatctcccgcaacacgtgagatatgcaaaagtgccgcacgctgaattgtgatcagcgtgcggcactgcgcgaaacgcgtgaaatccgcagaacgcacgaaactcacgaaacagataaaacgtataaaacgcaagcaaggcgaagacaacgaacagacagagacagacagcctacaggtcagaacgccagagaacgcacgtaggagccaacttgcgggcggaacagctaccggggattgttcgtttgcgatgttcgcattcatggcaggtttctccatacgattcgggcggtcggttcaggaggttggttggcggaggcaggttcggtatcagcgtcggtccaaggccacccagagcacgccgtgcggcggaatcgtgccggtgatgacgcggtcggcgcccacgccttcaagacgcacgtcggcgggctcgcccggcgcgtcggcatacagatcggcgagtgtccaatcgtcattgcgggcgtcaagccccacgatggattggagttggatgttgcggccgatctcgtatgtgtcgctgccggtccagaacagcgcggcgtaatggccgccgtgatgcgcggaacgtgtgccatcggcccaatcggctgcgtcggcggaccagacgatgaactcgccacggtaggtgctctcatcccaccatttgccaaaaatccgttcgcgcacggtctcgcggttattggtggagccggcaagcacctcacgcaacgcgggattctgcagcagcgcgatagcgtcgctgttgctggtgggcagatcgccgccgaccataagcgggctacgccccatgcaccatagggccagcagtgtcttctgctcgtccagcgtaaggcgggattggcggtcgtcgccgcgttcggcgcgcaggcctatgtgcccgaacggcaccatgtcggcgtcggcccagtggccggtggtctggaacggcgcccagcgggccaggcgggcgaactgctggtagatgtcttcccaacggtcccacagatcgtcggaaatacgccacatttgggcgttctcgcgcaggaagtcgacgtagctcgtcgccacccagccgccgggcgagagagacaggtcaatcgaacggccgtatttggcttcggctttggcgatggcgcgatgataggcggcgatttcgtcggagtggaacggggtctgcatgtcgtcgaccttgaggaagtcgaggccccaggaggcgaacaggtcgagctgcgcgtcataccaggcctgcgcgcccgggtgggattggttcaggccgtagttgtccggattccacttgcacacgtggtcgaggtcggccacgtccttggcggtgtagttggtgccgtatacgggcaggttcttgtccacggcgatacgcgggatgccgcgcatcatgtgcatgccaagcttcaagcccagttcgtggacggcggcggcgagcgggccgaatcccttgccgccggcagcactcgggaaacgcaccgggtcaggcagctgacggccgtattcgtcgagaatcagcggcgcgttgtcgttgtaaccatgtgcgcgggcggtcgggtcgtaccagtcgatgtcgatgaccagcgtatcccagccggcgtttttcaggtgttcagccatgaaccgcgcgttggccagcagctcgtcttcggtgagggtcgtgccataggaatcccagctgttccagcccatcggcggacgccatgcctgaggaaggctctgcggaagatccgtcatcgtatcctgctttcgttgatattcgcataagttgccctacggcggtatgccagccgcaaaccaatcggcatcgcgcacgtacggataggtgaagagtgacgccactcccccggagagtcccatcccaacgtacgacgaacttcatggcctcttggcacaccgacgtatgtaccgttacatattcttccaccggaacgatatcaagcaagcgcatgttacgctcggcgcgtcatcgcctaagcgcagcattttcagcgattccggcacacagccaccatttgccaaaacacgatgttgtgaataccgttacaaccattggaagcattacgggcatgatccaatgcccatcacaggcgaaacatgaggtgacgttatgccgagcggcaaaccaacattgcgcgacgtagcgaaagccgccggggtctcccccatgaccgcctcgaatgcgctgcacggcaagccgggtgttaaggattccacgcgcgccaaggtgctggcggtggccgaaaagcttgattaccgcatcaatctgacggccagcatgctgaagtccggccgcagcaacatcatccacatcatcgtcaacgaattcgattcgccgttctactccaaactcgtcgaatcgctcgtcaccgaaaccaccgagcgcgggctgacgccgttcgtggagcaaacccggtactctccggatgccgccaaacacgcgctggccaacaacccgttctccgggcagttgttcgacggcgagattatccacgcttcgggcctgaatgccggtgtgccgctttccgcgatcaaccacggccgaccgctggttctgattgacgcctgcgaagaaacgcccacgttcgatacagtgaatttcccgaacgaggacggcgcgcgggcggcagtgcagcatctcatcgaatgcggatgccaccgcatcgccatcgtcggcgacgggtattcgccacgaaccgaactggcgcacgtggaaagttccagcggtttgcgtctacgcggggccagcggcgcactgcttgacgccgggctgccgtatgacgaatcgacgaacttcattggttacggtagcgacagcggcatcgaagccggtcatgccatcgccgaggcgatgctcgaggctcgtgcgcaatcggctgatgacactgctgagtcccgttccccgggcaccacgcgggcaacgggaagcaccccggccatcgatggcatcttctgcattaacgactatgccgcattcggagtaatccgaggccttgccgactacggcatccgcgtgcccgacgatgtgagagtcatcggcttcgacggcgccacggccggctcgtacaccacaccgacgctgagcaccgtccaagtggatctcgatcagctcgcccaattcgcgcttgatatgatcacccgccgcgtggagcagcgcgaccagggcgacggcaggtccgacgaatccgctggcatgccggccacgcgcgccaccattggatacacactggttccgcgcgagtccactgtcggttcggcaaacaggtaacgctgaaacgccgaaatagggcggcgattcccgactgccgcgcccactgcccaagtgccgtgcagcgtgacgtgcgaggtttcggcatgcgtcaaaccgttcccagcgctcccacgtggtagtggcgcccatgcgcacttttcctagggttaggaccatgaccttccctaatcacacggtgttgtagaggcgggcggggaaagcgtcgcggtattggccgggggtcaggccagtgcggcgcttgaagacgcgcatgaagtacttgggatcggcgtagcccacttctcgcgcaatatccgccacgctggaagcggtagaactcagcagttcgcgcgcacggtcgatgcgatattcgatgatctgctcggccacacccacgccgaacacgcgccggtacatcgcggtcagatagctgggtgaatagtggaagcgcgcggccactttggccacggtgatgtcgtcgaaggcattggccataatccacgagcggatggccagcatcggcgccaggccggacgaatcgccagcggcaccggccgaatcgacatgcatggcccattcctgttgctgccggacgcggtcggcactggtgatgggcttgccgtcgccccggtagccggcaagcgtacgatgggcggcaaagcccgccttcagccgctcctgcgcgctgacctccagcagcaggccggtggcgaagtaatcgcagtaagcgttggaatacgggccgaatcgcgcatagatgtcgatgagctgcccacacatcaccgccagccggtcggggtcgggcagggtgcgttcatcgggcagcaacaggcaatggtcgtcctgcggcagacccgcgtcatcggggagcatgcgcgcatccggcaatttgaaatgcatccagtagaagtccacgtcagacgtgatgatgtcggcgcccgcatgctccacattcggcggcaagagtgcgatttggccggcctcgatatgcagggtccgctcccccacccgcatcggcaggacgccccgacgcacgaacatcagctcgaaggtgtcgatggtgcgccgcagatggcgccagcccggtccggacacaaactgcccgaccgagtaaaagtccaccggcccttcgagccgacatgtcgtgatgcccatggctaccagagtagccgagagcaaatatcagccgcgcagccagacggtcatttcgttttcgccgcggttggcccaggcgaagtacgggatgagcgtggcggtggcgggctcgcgcttgaccggcgcgtacacggcgtagagcggcgcgaacgccgaaacgtcggccgcgccctcacccgcggcggccacagcagccggcaacggctcgcgccaagccggcacctcaagcttcaccatgcggcgggtcacatcttccacctcaccttgtccctgctcatcgatgccagtagcgccggcgtggaagtcgaactcctcgaccttgaccgcgctcgggtcggccagcagtgcctccacatccgcgtgcagcaggtgcaggttggcgccgttgtctttttcctcggcgcagaaggtgatcggaccgcgcacgaacgccaccttgccggcgtcctcgctcaccagcgggttggcggccagcatacgcaccggcatcgggaagtcgaacgtcacggtgtcgccgtcgcgccactcaccggtcaggtacaggtatccgtcgcgaatttcacgggtcacgcgggaaccatcggccccagactcagactcgcccgtggccgtaatcgcggcggcagcagcggactcatcgcccacccaaccgggcagacggaaggccagcgtaaagcgagcaggagcctgagccgaggtgccagcagcgtcaccgcccaaacgcacgacagccttgccatcgccctgccacggcaggttcgccgtaacatccagctccacagccgtaccattcaactcagctttggccacgccgcccatatacaagtgcgtgaacagcgtaccgccatcctcggcaaccgtgtaggcatattcctgcaccgactcaacgatgcgggcgatgttcggcgggcagcatgcgcagccgaaccacttctgacgcactggcttgacgtggcgcaggcggctgtctttatggcaggcatacggattgacttccagcgggttcacgtagaagaagctcttgccgtccagcgccatgccggccagcgtggtgttgtacagcgccgactccataacgtccgcatactcggcctttggcgcgagctcgagcatgcgacgggcgaagaacgccagcgaaatcgcggcgcaggtctcggagtaggcggagtcgttgggtaggtcgtagttgtaggagaatgcctcgccgtccaccgtgccgccgatgccgccggtaacgtacagtttcttatcgacgatattgcgccagagccgctcggccgcatcggcgaggtcctggtcgtcggtcagtcgggccacgtccgccagaccggagtagaagtagccggcgcgcacggcatggcctacggcttcgtcttgttcggtgaccggcttgttcgcctggtgataggcgtaccggttggggtccgtgttgggtttgtagttggcgtcggcgtcgcgctttgcgttctcgtctgcctgaatatcgaagatgtacggctgccggccgcgctcggtcacgaaatattcggccagatcaaggtactgttgctcaccggtgacctcgtacagcctcaccaaagccatctcggcaatctcatgaccggggtaaccacgcagctggcccggcttgcgaccgaagcgctcgtctacgtaatcggcgaaacggcaggcggccttgagcaacttgtctttgccggtgccctggtagtaggccaccgcaccttcaacgaggtggccgaggcagtacagttcgtgatgatcacgcagattggtgaacgcgcgatccatgtcgttcagaatgtagcaggtgtccagatagccgttgtcgagttgggcggcgcacacgatgtcgatggcttggtcggcggtctgttccagtgcggggtccgggtgatgggcgagggaatagccgactgcctccacccacttggagaagtcggtgtcttggaacacgaagccgtagaacttgtctgggtcgggattggccgggtcttcggggagcgcctcaaatccgcggaacgtgtacttcggcggcacgaacgccttgccctgggtatccttacgcttgttttgcgcggcagcggccttgaagttgtgcatgcagtagctgggggccgcgccggggacgttatcgttcagggcgttccactgatagggaatcacagccgtgcgcacgagttcctgctcggcgcgccagaatgaatcggtgacggtgacgtttttcagggccagcggcttgctatgcagcgaagtcatgacgtactcctttggactatgcgacattcgtcaacaatatgtatcggtacatatgatacgtgcgcccgcgcgatccgcaaggtggacaaatcgttggcggggtggaatagccggcgcatatccgcccgtacgatttcgcccggtgaatcgcccgacgaatacacggcgacttatactaccgacggaccacaaacgtcgcctacatgaatggaagatcaatcatcatgacagcaaacgccagcgcacgggccatcaaacccgaacttctgcgtacgtacaccgaagacttcaacaaagaccgcgccaacctgatcgcggcggacgcggcggtttcggccggcgtgctcaaggcggccaccgactatcgcggcgtacgtgcgctgccgcgcgacttctccatcgaactcaagcagggttcgatcaccaatcaggagcgttccggccgttgctggatgttcgcctccctgaacacgctgcgttacgaactcatgcatcgctggaatcttgaggatttcgagttctccgagacctacctgttcttctgggacgcgatggagaagtcgaacacttatctggagaacgtgctgcgcacgctcgacgaggcgaccgattcgcgtctgttcgaggccatcaatgagtcgcctgcagacgatggtggctggtggcagatgttcgctgcactggtgaacaagtacggcctagtgcccaagagcgcctacccggagtctgagaactcccgtaattccgacgatttcaagcagtacctcaactccaagctgcgcgagttcgcggccgagctgcgccgccgttcggctgccggggcgtctgaggacgagctgcgtgcgttgaaggacgagtacatgggcaccgtgtaccgcatctgcgccgtggcgctcggcgaaccgccggagaagttcgacttcttcgcgcgcaccaaggatgatgatgaggataagaagggcgaggcttgcaagtgcaaggccgaggccgacgcagacggcaaggccgaatcctgcaagtgcggcgaatcctgcaagtgcgagggcaaatccgacgccaaggcctgcaagtgcgataaggacaagcccgacaagccgaaaaccggcaaggacgagcgcccgcagattcgcgagatcggcatcaccccgcttgagttctacaagaagtacgtgccggtggacgtcaacgatttcgtgacgctggccaacgccccgctcaagaaccgcccgttcaaccagcgctaccgcatccgcttcagcgcgaacgtggccgaggctggcgatatggaattcgtcaacgtgccgctggacgtgttcaagaaggccgcgcttgaccagctcaccgccggccacccgatctggttcgcctgcgactgcacacagttcgccctgcgcaaggacggtttcttcgaccagtccgtggtgcgcgtcgaccagctgttcggcaccgaattcaccggcgacaaggcccacggcctcgaatacggcgacagcccgagcaaccacgctatgaccttcaccggcgtgaacctcggcgaggacggcaagccgaaccgctggaaggtggagaacagctggggcaaagacgccggcaaggacggctactacgtcatgtccgacgcctggttcgaccgctacgttaccgagctcatcatccgcaaggaatacctcgacgacgccacccgcgccctgctcaccaccgaaccagtcgagcttgatccctggcagcccctcacccgtcgctgccgctgacatattccgcccattggccgcggctgaagtgctcctatgttttgccgactcctcacagagtgagcaaaacataggagcactttagttatccacagagttatccacattctcagcaagctagaaccacataccccgtttttcatggcgaacacgcggccgctacgctacggtggcgttatgaacagcggatttcccaccccgccacccggcgtattcgacgatgaaccacccggctggaccaacaatgccgcggcaccgagtgctgcgtccacgcacgccgtcaagcccgagccatactcaccaccgcgtatggcaacccccactgcgcccgctatgagcgaaaccctcacccaacgtaagcgggaaatgcttaaacgatgcacggacgccgcgcaacagctcggaaagcctgtgctcttcggcatgaccacatcgctgatactgcaatccgtgccgcttcccaaggattgcgatctcaatgccaccgagctccataccgtctccgactcgcatcgcacccggatacgcgccgtcgttccgccaacaacaccgcacatctggaaaccgctaagcgccgcgcacaatgcacgtatcaacaagcatgtgcacgcgctgaatctggtacatacttgggcgcagctcgccgctcacatgtcattggaatcattggtcatacttggcgacgcaacccttacggcaatagcgcgcaagccgagcctatcgggcggccgcaccgccgacgaaatttatcaggactttgtgcggcaggtcagcgaacttccgaaattcaacgcgaaagccacatgcatgatcgcacttgaatttattgcaccgcgcgtggattctccgatggaatcagagacccgtatcacaaccacgcaatacgggcttccacgagccgtgacaaattacacagtgcccggcgcgacgttcagcaatggtgagccgataacactcgatctcgcttggcccgaattccgcgtcgccatcgaatatgacggcgatcatcatcgcacagacaaggcccagtggcggcgagacaacgacaagcgcgaactgttacggcatcatcattggatcgtcctcatcgccaccgccgcgaatatggctgatgaaccgtctcaagccgaactcgcctaccgagccgggcgacagctggcgttgcgaggcgccatattcgatttcaccttgacagcgacgccgctcaatgaacttgcccggcggaaacgacggaaatccaccggggcgcactgagctgacatcgatacgattgcgcgcgcttgctgcaacgcatatgccattcatcgcaccccatttggtcgcgtggccccgaccgcatggcactgttgtgtgtcacacgccatgttacgtccggcgaatccgcacatcatctgcgttgcgtactgccatattatgcggttcgcgatatacgtcacggtgtccgatgtcctggtaacgacgtcaatcgatttatgtgtgtaccgggccagattttgttgtcccggttctccatttcgcctctttttgagcaaccgggacagaaacaccctcgaaaaatcgccaattcggccctaccgcacaatatccgccatcacacatcggcggaattccgggcttctggatttgcatacattgagcgctcacgggatggtctgtcccggttcccaaaaagaggccaaaatcacgaaccgggacaacgaaatctggcccggttcgcacgtcaatcggttgccgtcaccaccgggacaccgactgcgcatagataagatgcttcaatgcttaacaggcatgcgaccataccgcgatagcaacgtttcgctggaagtagaggaatcaagcagcaccccccaaaccggaagcaatgctccgaatcaccgcgccccgtgcttggtgtggcggatcacggcttcgagcggcgtggatgtagctggacagcagcgtaacttgcgttgcatgatgcggcccaaaacgaagaaacccggcggagggggccgccgggtgagagagaagagagaagaagggttcagttatggggttcggaagaacctcgccaccggtatgaacttcattccgttgacatcttctatataaccgtctctttcttggggattcgatgtgcttgtctgagaaaagtcttggcaaactgtgacgggtttgtaacgccgcccgacaaccggcctcgcattgtcggggctaggccgcacatacggcaacgggccaccccgcaacacttcatgtgcgaggtggcccgtcagctacgagctagcgatgccgaatcactcggcggcgagcttggccttctcggcggccagacgctcggcttcggcggcacggcgagcagccaacgcttcatcgaagcgcgccagctcctcttccacggcctcggtcggaatcttggcgaagatcggtgcgggcttaggcaccacagcgccaacctcgattgcctcgctcttccacgggtgcacgttcacaccgagctcgtaatcgccggtgatgatcgggtacgtgaagccgggcttgtcgagatcctcgacttccttgagctcaggcagcggcgagaaggtgccggtgccgccgagcgcctcccacaccttctgtgcggagtgcggcaggaacggcgcgagcaggtggttcgcgtcagacacggcctgagcggccacgtgcagcacggtgccgagacgagcctggtcgtccttaatcttccacggttcggtggcggaaatgtacttgttgatgtcgccgaccacacgcatcgcctcggacagggcgtgcttctggtggtgggtttcgatggaggagccgaccacgtcgaacgcggcggaagcctcttccagaaggccacggtcttcgttggtcatcgaatcctcgtccagcggcggaatctcgccgaagttcttgttgatgaggttggccacgcggttcaccaggttgccccacgaggaggcgagctcctcgttgttgtggcgcacgaactcggcccacgtgaagtcggaatccgaggattcggggccggccacggaaatgtagtagcgcacggcatccacggggtagcgggcgaggatgtccttgacgtagatcacgatgccgcgggaggagctgaacttcttgccttccatggtcatgaactcgctggccaccacctgctcaggcaggttgagcggacccatcgggccggtttcgccgcccttggagcccttgccgttgtacgccagcatttcggacggccagatctgggagtggaaggtgatgttgtcctttcccatgaagtagtaggccgggcagctcgggtcgttccaccattcgcgccacttctccgggtcgccctgacggcgggcccattcgatggaagccgacaggtagccgatcacggcgtcgaaccacacgtacagcttcttgttcgggttgtcaatccagtccttcaccggcaccgggataccccagtcgatgtcacgggtgatggcgcgcggcttaacttccttgaacaggccgagcgagaagttgatgacgttggtacgccagcccttgcgggtctccagccacgccttgttggcttcggcgagcgccggcaggtcgaggaagtagtgctcggtctgctcgaagcgcggggtttcgccgttaatcttggagacggggttgatgagctcgtccgggtcgagctcgttgccgcaggcgtcgcactggtcgccacgcgcaccttcggcatggcaaatcgggcactcgccctcgatgtagcggtcgggcagggtacggccggtggacgggctaatcgccacctgctgggtgcccttgtagatgtagccgttctccaagcactgcttgaacatctcctgcaccacgtgctcgtggttaccggtggtggtgcgggtgaacaggtcgtagctcaggccgaggtcgcacagatccttggcgatcacgcggttgtaacggttggccagttcctgggcagtgagaccttccttctccgcctcgacgagaatcggggtgccgtgctcgtcggtgccggacaccatgagcacatcattgcccttcatgcgctcgtagcgcgcgtagacgtcggaaggcacaccaaatcccgcgacgtggccgatatgacgggggccgtttgcatacggccaagcaacattcaccaaaacatgactcataaggcttgattatccggcgcggcggggacacgcccggatagctgccgcgccgccatcctcatcccactcacctatccacccgcaacttccccacatacttatctgtacacctcttgcgcgcttatccacatacgcattcgcacacgtatccgcgcacccatccgtacgcacgcccacgcacatccgcacacacttccgcctgccaatatccaccgagttatccacatcatttgcgcacctagtaaagttatgcacttatccaccgttttcgcctatccggtggcgcgcaagccgcatttctgcatattgttcggtcatggatatcacagcaggtccgatgacggacatcacaacagtcgcctcgccggcaaccgcgcaacctgcggtgccgccgatactgtttaccaaggatctgccgggaccgctcagccttaaccgtctggccgccttcggcacgttacataagctcgacgattccgccggctactggatcgagcattcgggcacactgtatggtcgcgcgaaaatcgtcgcggaggtcgccccgtttggcactgtggtgtgttcgatgaccgccgcttgggtatggctgggaggccccgactttccgagtaccatagacgtgatttccacatcgcacttccgctcggcatccgtcagccgccgtatccgcgtattcaaaagattgacgttgccggagcaaatcatcaagctcggcgggctgcctgtcaccacgccagcccgtacggcttgcgacctggtgatgagtcctgaagacatccccgatccttccaccgtcaacgcactggtgtgccagctgatgtccgcgtaccagtttcggccaaacgactgtctgcaaatcgtcaaggagcatcggcatcacaagtacgccggacgcgcacgcatgttttttgaatcggtgcagcaggagatggacgaaccggctttggagcaatgcgcatgacgagggggttcattgtcagaggccatcgcagaggccgccatgccgctcaccgtttacggcatttgcggcaggcgcaacggttgcctcgccacgcggcggcggcacactcatccgaatccgcatcgcgcgcaatctcggatatgaccgcgccgcctgaaccgcccatcagacttacgcccgcggtggcatgttcgcccgatacggatgttgccgtgctctggcacatcgcatatcacgtgcccgaactgcgtaaatggctggttgccaatcccaaagccgacgcgcctttgctggaattggtctcgcagcgtggtgggcccggggtccggcaggcgttggaaatattgttcgagtcgatggaagcgtaacggggagataatcgccggctgctgcgctatcccttgattttcagcacagccgcatacacctgcttgcgattggccaacgatccgtcagccagtggatgctcctgcaccacttgcgcgatggcgtccttgatacgcaggccgtcctccaaagcacggtcgatggagagcacggccatgtcatccacgctcaacgtgctgggcgcggccgcttcggcctcctcgttggacgcgccgccgatgaccagcaccatctcgccacggggcggatcatcaatcacactttggcgaatctcgtcaatcgggccgcgacgaatctgctcataatccttggtgagttcgcggcacagggccatcgggcgattcgggccgaacgcgtccagcagatcgtccatcgaatcggcaatgcgatgaggcgtctcgtagaacacgatggtgcggcgctcgggcaacagcgtgcgcagatactgcacgcgctcggaatgctttcgcggtaggaagccttcgtagcagaagcggtcggtaggcagcccggagagggcgagcgcgtcgagcacagcggaggggccgggcgcgcaggtgacgggcagaccgcgttcaatggcacggcgcacgatggccaagccggggtcgttgatggtgggcatgccggcgtcggatacgacgagcacggtggcgccggtttcgacctggtcgagcaggccgtcggccttgtcgcgctcgttgtggtcgtgataggcgatgacgcgaccgttcacatagacgccgaggcgacgggcgagatcgtagaggcggcgcgtgtcttcggcggccacgatatcggcccgttccaagagggccaccagacgggctgaagcgtcgccgacattgccgatcggggtggcggcgagcaccacggtgccggcggggatggtcacggccgattcgcgggattgggcgacggcggattcgccggcatgaacttcatcattgcgttcaggcacttgcgtcacgctaccgtcagcgtcatactgctcattcaactcatctgcgcttgtcatactcccagtattgcccatgccacagagcaatccacgacaatccatggcgaaatcgaggcattctccctttgcaggggctgagagagatggcagaatttcaacgaaaacaaaatgaaaagaccctctgcggtggaatgaatgcagagggtctcgtggagctgacggtagtcgaaaccgcgacctcttcgatgcgaacgaagcgctctaccaactgagctacagccccttggatgttactttgctccgcaaagcaactcgcaacaatatagtacggagtgcggtcaaacgcaatttgacgccgaagtgtcgcacgcgtgtcgacacggtaacgtttcggtgtcgcagacggggcaagtcacccacaccgctccgtatggataccgcggcggcacccggcaacgccatcacgtctccagcacgcccaacaccttcttctcgttgtagaacgcgaacacgatgccgcccagaccgcacagcacggccgcgcacacggcggcgatgcggtagcccgcgccggacgccatgccgatggtggagacgccggtgaacagcagcatggccacggactggcccatcttcatcgcaaaggtgcgggccgcgtagaacatgccctgacggtcctggccggtggtcttggaactggcgtcggcgatattcgccacgatggcctgcggcaggatgccgaacgcggccatcggaatcgcgccgaccaccgagagcaccaaaccctgggccatcgccggaatgaagccgagcacggccgaaccaagggcgccggcaaatgcgaacgcacaggtgaagatcacgaaggcaaccagcagcagcctcttcttgccgaccttattggccagaatattgaccggcagatagaacagcacagagacgccggtcatgagcacgaagtagatggtcgtggtggtttccggcagcttgagcaggctggtcacgaagaacggcagaccggtctggaaggtggtgatggccacccagtagaccacgtcggagcatacgaacttgcggaattcgccgtcgccgaacgtctgcttcagggattcgatggtcgattcggaggtgggatgggagttgacgtagtccttctcgcggatggccagcggcggcaccagcatgcacacgaacgccacggcggccatgatggtgaaggtcacgcggatggcggtgatgcggcccatcatcggcacgaacgcgccccaaatcaccggcgccacgtacgcgatggccgtgccggccacccaagtgaaggagatggcggtggagatggtgagttgctgcttggagtcgtggccgagttcggcgatgagcgcgttgtacggcgtgcagtagaacgtgagggcgatgtagtagccgatcacggtgacgaacaggaacgccgcgttcacccagctggtgccgttgatcgggctccagaacacgagcacggtgaccaccgcgagcggcagggcggcgaatttcaggaacggcatacggcgtccagatttggaatcgcaacggtcggaaagggacgccacggccggatccacgaaggcgtcgaagaatcgggcgaaggcggtgatgccgcccaccacggtcacgatgccgagcacaaccaggccttgcggcacgaatacggtctggccttgagagatggtctcctgatcgggctgatagaaatacacgagccagttggagataatgccggaaagcagtgcccagccgaactggccgaccgcaaacgcccacactttggcgatggggagatctctgatggctgacttcgccggtgcaacttgcgcacccgttacacttgctgtagtcgtattgcccattctcacaacctccgaatcaacattgacacagtgtcaaaatccagtatacaccggcacaccatgcgttctacgatagtgggcatgacaagtctgaccgagcaactgccatacgtatacgcttttcctgatgcgttggggaccggattactggtgcacaccgagagcgtattggacgatgagatacgcgatcgtattggctcgttcatccatgaatatgaggttgtattatctcgattccgcgatgattccatcgtcggccggatgcgcacggccgcacatggcggcacgttcgattttcccgactgggcatcgggtctgtttggcctgtacgaccgcctgcttgcggcaaccgatggggcgatcgacccgtgcgtgggcgaggatttgattcggcttggctacgacgagtcgtattcgtttgcggctacgcccgatgccgccgaacatgcaggcgcgatccacggacgagccgtttggtcagccgacgttgagcggcacggcaccacacttatcacccacagcccagtcgcgctcgatttcggtgcgtgcggtaaggggtatttggtggatttgcttgcggggatgttgggtgatggcgcgggccaccctcaacccattcaatacgtcatcgacgccgggggtgatttgctagtgcacacggacgaaccaatcaccatcgcccttgaagatcctgccgatccggccaacgccgtaggtgcggtcgaaatcagccaaggtgcattctgcgcgagctcccccagccgccgccactggtctgacgccgcaggtcaccaacttcaccatctgctcaacgccatcgacggactaccggttgacgatgtagccgccacatgggtggccgtcacgccgccatcgagcaccataaccacgaagacatcgacgcatggcagcaatgcctcgacaacggcaaaccgcgataccgacgattcgtcgaacaccgttgcagcacacgtccctgtcacactggccgacggactcgccactgctctgttcaccacctcggccacccagttacgcgctcatttccccttcgaatgcgccatcctcaacgccaaccgcaccgccgcccaatcccccaattttccgggcggttttttcacacactaatgtacgaaatcatcagtatcacatccagtggagcattccctcgggtggaccgatgggttgctccccctcagtcagctacgctgacagctcccctcggagaggggagccgagtatagctaatccgctaatccgctaacgcaggaaacaatccgtcagtcagcaagcgcgaactggctgttgtagaggtcggcgtaaaaaccgcccgccgccagcagttcatcatgcgtgccgcgctcgatcacgtcgccgtggttcatgacgaggatcatgtcggcgtcgcgaatcgtggagaggcgatgcgcgatcacaaagctcgtacgccccacggtcagcgcatccatggccttctgaatcagctcttcagtacgggtatcgaccgaggaggtggcctcgtcgagaatcagaatcggcgcgtcctgcaccatcgcgcgggcgatggtcagcagctgcttctggccctgggagagcgacgacttgtcatcgagcacggtgtcatagccgtccggcagtgagcggatgaagtggtcgaggcccacggccttgcacgcatcctcgatttgcttgttggtcacgccaggcttggagtaagcgacgttctcgcgcacagtgccgcggaacacccacgtatcctgcaacaccatggagaactggtcgtgcacgttccagcgcggcacggacttggtgtccacgccgtcaatcgaaatcgaaccgccggaaatctcatagaagcgcatcagcaggttgaccatggtggtcttgccggcaccggtcgggccgacgatggcgaccttctgaccggccgagactgaagcggagaagtcgttgataatcggcttgcccggctcgtagccgaactgcacgtggctgaattccacgtcgcccttcacttcgtggccgcccatgtagttcttgccgagtagggcctgcttgccggattcgtcttccatctccggctcttcaaggaagccgaacacgcgctcggcggcggccgcgcagcgctgcaggttctggaaggcctgcgcaaactgcgaaagcggctgagtgaacaggcggatgtacatcatgaacgccacaatcacgccgaactcgatctgcccgtcgagcgcgagcgccgcgcccaccacgcacaccaccacgtagccgaagttgcccacgaaattcatgagcggcatcatcaggccggagaggaactgcgacttccagccggactcgtagaggtccgagttgtacttctcgaagcgacgaatcgaatcggcctcgccgttgtatgccttgacgatgaggtgaccggcgtacatctcctccacgtggccgttgacgtcacccagcgccatctgctgccgggcgaagtacttctgggaggacttcatgatggccatcatgatgatcaggccgatgaggctggcaccgatggcgcacagggtcatgatcacgttgttgtagaacatcatcaccagcgcgcccacgaacagcgtcaccgaggtaatcagcgagccgagcgactggcccagcgtctggccgatggcgtccacatcgttggttatgcgcgacagcacgtcgccgtagctaaccttgtcgaagtatttgagcggcagtttgttgattttgaccgagatggactcgcgcagtcgctgggcggtgcgctgggtgacgttggccatcatccagctttgcacgtagccgagcacggcgtagcccacgtacagggccaccaaagtccaggcgatgtggcccaccgtgccgaaatcgaccgagttcatcaccggcttgccgttaacgatggcgggcagacctttgacgatttcgttggtcatgtccttgagcttgtccgggccgatgatctggcagacggtgccggccgcgcccaggatgagcgcgatgatgatgacgggaagatagttgcggcaatagttcacgagcttgcccatgactttgccgaaatcatggggctcttcgacggcacgcctgccgcccattggtcctcttggcatttgttttactccttaaaagtccgtattgacctccctctgatgaaggaggtggcgcgaagcgccggagggagagaagccgtacgcgactacccctcagtcagctgtgctgttttattcgctcgcttatcagctcgtcttcgcctgggaacagcccactgggctgttccctttacggctcagcccctgacatggggagctaccgctgccgccccccctacgccgtaagctccgactggctgagctgggattcggcgatctggcggtatacgtcgcagttgtcgagcagttccttgtgcgtgccctgacccacgaccttgccgtcgtcgagcacgacgatgcggtcggcgttcatgatggtgccgatgcgctgggccacgatgagcttggtggaatccttggcctcgcgggcgagcgcgtcgcgcacttcgcggtcggtcttgaagtcgagcgcggagaacgagtcgtcgaaaatcaggatttccgggtgacggtacaccgcgcgcgcaatcgacaggcgctgcttctggccgccggacacgttcgatccgccttgggcgatcgcggcggaatacccgccgtccatgcgcgccacgaactcgctggcctgcgccacgtcggcggcggccctgacgcgattcagctgctcggccggcatatcggcaccttccgcagccttgccagcggcgatcaacgcggcctcgcgcttgcgcccggccggggtggaggtatcggccatctcgacctccgccgggtcgcccggctgatcgccgtagctcacgttggaggccacggtgcccttgaacagcacggactgctgcggcacgtagccgatcttgtcgcgcagggccttcaggtcgtagtcgcgcacgtccacgccgtcgaccaacacctggccttggctggtgtcatagaagcgcggcacgagattgataagagacgacttgccggagccggtggagccgatgaacgccaccgtctggccctgctcggcggtgaagttgatgccttccagcatcgcctcgcgcgaatccgggtaggtgaagctgacgttgcggaattccacggtgcctcgctgaccggttttggccacgtcggcggcggttttggtgccgttctcgacgatcggctcggtgtcgagtacctccatgatgcgctgcgcggacacgtcggcgcgcggccagagcacgaacaccatgctcatgagcaggaagctcatgatgacctgcacggagtagttggagaacaccaccatgttggagaacacggtgagcttgtccttgagcccggcggcatcgatcaggtaggtaccgatccagtagacggcaagcatcagaccgttcatgatggtgttcatcagcggcatcatgaacgccatgacgcggttggtgaacagctgggtgtcggtgaggtccttgttggccttggtgaatttggcttcctggtagtcctcggcgttgtaggcgcgcaccacacgcaggccggtgaggttctcgcgggccacgaggttgatgttgtcggtcagggcctgcatggccttgaatttcggcatgaccatggccatcatgatgacgatggccgccagcagaatcactacggcgattccggtggcgagcgtccattcgaagccttcgccggcgatcttgcacacggcccatactgccataatcggcgatttgacgatgagctgcagacccatggtgatgaacatctgcacctgcgtgacgtcgttggtggagcgggtgatgaggctggcggtggagaacttgctcatttcggccgggccgaaggactcgaccttgcggaattcgagcgagcgcagacgctgggtgaacgaggccgccacgcgcgcagcgatgtagccggtgatgatggcacacgccgcggatccgaacgagatgagcagcatcttgccgccggcaatccaaatgtccttcatgtggctgcccggcgtttcgaccagcgtggtgatgtctgacatatagtcgggcagtttcaggtcgaagtagacctgcccgacgatggtcaccagagcgatgagcatctgaccgatctccgctttggagaggtatttcatgatgcgaagcattggtttccccttgtgttggttgggttggttattggttattgacgattggttcttaagttggctgggttatcggtgattatcggttcacgatgtcttaatagtttccattgtttgattacttacactgtgagatattatacgcacttctgtatgttcgctgtgagcgtcctcaattagccttgccgattagttctccgcgcgcttagctgccatgtgttcagccacgcgcttgccccgctccacgaatgcctcacgcacctgttcagcagtcggccgaggctgtcccggatggcaaatcgacatatatgtggtgaactcagacaccaggtcaacgaattcgcgcgtgcgccgctcccccatttgcgagaaaatccagcaaatcgcggaacgcatttcctctatcatccgatgagactgctcgcgcccggaatcagtgagattcacgcgaataatgcgccgatccttggaatcaatgtcacgcgtgacccagcctttcttctccagagacgacagcacagtggagatgcggccggaactggcctgcagcgccgatgccaattgcgatggcgtttgcgtccccttcatggacagctcccggagcacgaactgctcaccatgggctccacgagtgaattccctctgcattgtcgaacgattgccccacacgctggcatacagttcactaactgcttcctgctcaaatcccataagagcaccatccattcccattcgccacacggcagagcgccgcaaacaccccaagaatatctcacaccgtaaacaattcattactagaaactatttttggaacgcataatgcacacactccacgctctttgatattctgaaagccgcatagatattcacttcggggcgtcgtctaagaatatttgctgggccaacggtagcgacgttggcattgtgctccatgaggtatctggtcgaaaaggcggacgaagacagaccagttgggcggagcgcgcccatacctcaaaaccattgcaattattggctttgaccattttcgtggagtcacgaaaatggtcatgaaaaacataaggacacacccatgaaccgcgacgaaatcacacgcaaaaccagcgaactcagcactcccgatacgcctgctatctcattgctcaaaacggtgatccaaagaaagaagaagtggcacttctccagagctattttgccgttcagactcgcaaaacggaaatcattgagcaacgcatgggagaaatcagccggctcgccggccgagaggcccttgccactgcagagaagaaactctatccgtatacccaaatcacacacaacaaaaccgcacaagtgcacatgtacacgcccaaccacgccgcagaacgccggcaaggatgtgatacaggccacagaaagcgttgtaccgcctaggcaatgcaacaattgtccgctatgctctgaaggcagatggcggcacggatgccatcccaaagagggggtatgaccatgattcggggtatgaacctatgcagcatcgccggctgcacgcacgaagcagaagaagcgggcatgtgcaacatgcatttcacatcggcactggttcacggagcgctgcactacactgcgggcggacgtccgtcgcactgctgagcgcaacaacaaagcaaaacaaccagtaacgctcaacggcttccacatgttcatgctctaattgcatgtacttgcagacacaatggccggtctgagccaactgccctcgcatggagcagctggctcagaccggccattattgttgctttgtactgtttgcactgtattgcgcctgcattgcgcaagctcgggcgcactcgggtgcgctcgctgagtggcgtgaatcgcagattgctcaatagcaacgcaatccacgccactcagcagttgccatggttatgcgcggcgtttgcggatgacgagcaaggcaccagacgcagctgtcagcaccacaaccacgaccgcaatggcagccacggcaacacccgtattcgaaaggggcgcagcgccattagcagccggcttattcgtggcagtgttaccgggcttagcagtgttgccaggattgttggtatcgccgggcttctgctctccagggccgggagtgacctccgtggccgtgaccgtgacttcgaacgtcgcgttcacgccacgataagagacggtgatggtcttcgtgcctgcggtggcagaatcaaagccagtgaacttcagaccaccatcagttggatcaatcagcttgcgcagcgtttcggtatcgccgactttgtaaatggcggataccttcacatcggcagcgttgaacttatcgcctacctgataggaatccttggtcacttccacagcaagctcggccaactgaggcagttcgccgaatgtcactgtgtaggtttccgccgtgccatcctcagcagttacagtcaccgtggccacgccgctgttctcggtcgaagcctgctccacctgcaccgtagccttcgcgtcagcagcagtcgcctccaccgtcgggtaagaagcagcgtctccggccagcgcaccggcatattcggtgatatccgcggagaatccgtcaaccgtcttgccatccacagtcagatcagcaagattggcgttactagacggctgcggctttggcgttgcttcaccttcggcgatgcgtacttcagcgatcttggcatagtcattgccatcggcgtaggtgaagttgaggcgaatgcccttggtggcgggcagagcgctcacatcggcttccgtcacggctccagcagcaccattcacagtgactgccggcagcgtggcatcagtccacgtggcgttgtcttcagctaggtacgatacagtgaagctcttcggagcggcctcgcccttggccttatccaccgcaacgctgagcttgcccagctgatatgccttatcgaaggtgtagctgagccacggcgaggtgtcgccggtgccccagttcgaccagttggtgctcagattgttgtcgcaagtcaggtcggccgtagaagcggaggcccagctgctggccggctcatacttcgaggctgcggcggacgagcagaacaaccgggcaaggttgctttccacagtcacggtgagcgtggcagttactgaagaatcagtgacaaggcgtaccgtcacggtttgctcgcccaatttggtggtgtcgaagccttccaacgtgtattcatctggctccagtacacgcgtcttgccattggtgagcgtagcggtaaccgtcacgtccttatgcgcgagcgtctgcctcttggcgatagtggcttcagggcccttggccgcgatggactccacagcagcagtctgcgaaccgaacgcagtgccgttgaaggccacggtgaatgcgccggcattgctgttcgacgtggcgaaagcaccggcatcgagcccggttacgtccgcaccggtcagcattaccgtagcgacatcctgccattcatcgttcgcggaagcacgccagtagcctttcagagtatcggttgaggtgcgctccagcttgagctgcacttggtcgccgaagccggtaccaacatgcgatgtttccttatcgatgtagccatcggcattggaatcgtactgcatgtaaacgccgcttgggctggcaagtaacgtggcatatcccttgccgccgttagcgccagtaagaccgttacggaccaccagaccggcgcgcggatcgccattaccgcccaagtcgagcggcttgaccgtggtttccagcgtttcgttcacgtccagagcatcaggctggtacaccgcactgccctcgttgcgatccgtccagacgccacgattggcgttgtccgtaatcatgaagtcataagcaccgccggacgcagaaacctggcacgcgctgccgcccttccaatgagcttccttccaacttccggaaatcgggttggagcaggaaacatcgatggttctacggaatgtacggcccggattgaagttactgctctcggcaagagtgcccgtaatggtgtaggttcccggcacattgaatgcgtaggtgttaccagcagccttggtcgacttgctgactgccgtaccgccttccacattccatgtcaccttggtagcaatggtatcgtcgccttccttgacgttgacggtgtccggcagagtaacggttccgcccgtgttcacggtcttcgggagatcatcgccggtttccacagtccagttgaccagcttgcccttggcgctaccatggttgccccaatagctcagatcccaaccgtcgggctcgccttcttgagcaggattgtgcatttcgatggtgccgttctcaccgatggtcagcggcagccaaacataggtggaatcggctttaccggaatcccaacggtcaccaaggtagatgaagtgacctttctcctggtctactgcgagcacactagccgactgcgaaccgaatgtggtgccgcgggtatcgcccacggacaacagaccatccgcgccttccggcatgttgttgtaccacgtgttctcgttgacatcgtccttttccacgccacgggtccagcttcccagcatggagtcggcggtgtagtaggtctgcttgttcggggcccagccggttgcaccagatgcgatgatgttgtaacgcccgtcatattggaatacggcaggagcttccagcgaaccattttgtttgacgatttggaaatcttcgccacgcaccggggcatccgtagtagcgtctgcaagaatgtatgggtactgcccgtcagcagagtactgcttttgtccctcggactggtccacattcgtggtcttgactacattggtgtaatcatcgttgagcttggcgatgtacagcgtggcattggcttcggaagaatacagtacataggcactgtcgtccttcgggtccacgaacacagtcatatcgcggctgtcaccgttctcaccccagctggggttacctgcggcttctttccaattgttctggttaggcaaacgataggcacccaccatagtgaacgggcccgccggattgtcggaaacagccacgcccgcaagtgcacgtgcatagttggaaccgcccggcgtggtgcttccatcggaatgccaccacagcacgtattgcttgttcttcttgttgtagatgatcttcggacgctcgaaaatgccctgtacggaatcaaccgcgccatcaccatcctgatcggggttggtgttgaggtacgggaagattgcgtcggccttggcagcgtccacactgccgtcggacttggtcaggttgtaggccttgtcgaagtaggcgtaatcggcattgctcttatccgtcaactgagatttgctggtcaccgcacgcagcgccacaccaagatcggtccagttgtatagatctgtcgacatataagcatgaacaccggggctgttgtcgtaaccgttagaacggtcttcgccataccagtagtaggcgtcgccaaccttgaccacttggccaccgtgcgcttggatgtgtgtgccgccattatcattggcgttcttggcataccaatatggctggaagtaatcgctagcgttcttgcccggatcggctgtgggctggaacttggtgtatgtcggcacttggccgatggtaggcaggtaatccacacctgccgcactggcacttgcagcggccagcccgcatgacaatagcgttgccgcggcggtaattgccgcgataagagcgcccttgcccttattgtttatcttcattgatttggttccttgattgatgataacggttttttgaacaaacagttatgtcgctatccgcgaagccagaaaaggttcgacaaatcaatataccgatactgaaaattcagtattcaacttgtcggaccaattatggtcaaagagcggaggaaccggccggcaatagtcaatattgccggcttgttccttcacccattactgcgcgagggtactatgcacgcttgcgcagcatgaacagtgcacccgcggcagcggccagcagagcgacagcgccagcgatggcggcaacactggaaccggtgttggccaccgtgttcttgttgccgttgccggtggcaccgggcttgttggtgttgccgggcttctgttcttcagggccaggggcgactgcgttggccttgaccgtgacgttgaaggtcgcggtcacaccacggtaggagacggtaatcgccttcttgcctgcggtggtggagtcgaacgagccaatcgcaagctgcgggtcgtcaagagcgaccggcacttccttggtcttgtcgccactctggtagacggcagtcaccttcagaccggcggtatcgagcttgtcgccgatggcgtactcggtcttcgtgggtccgatcaccttgagcgaagccaaagtgaaggcgttgaaggtcaccgtgtaggtcttcgtctcagactcgtcggctgaggtcaccgtaatggcggccttgccgccaagcttgccgttctcaaccgcgtcgccagtcaccttgacggcggcggcattgtcggtggcgaaggcctgcagcaccgggtttgcctcggcgtcgaccggcagatcaaccgtgtagtcggtcttggacgggtcgaagccttcaacggtttcgccgtcaagacgcaggtcgcccagcgtggcatcggatgctggctgcggggtgagtaccgtgctgtcttgtgcgaacacctggatctcagccacgttgatgtacaccttggtgtcctgcaatgtgttagtcaggcggatggccttggcctttaccggggtgccgagcacgaagtcaacggtcggggtgtcggcggcggtgatgccgtcggagccagagccggcatcgccggcctgtatcttccagccatccttggtaccgactccatgccattcgccagcctcatcctggtattccagcgtctggctcttcggccaagacgcacgaccatcgtagtagaagaaggtcttcacttcggtgatggtctgagcttcgtcgaaggtgaacgtggcgaccgggtccaccgtcgaggcggtggaagcccaagtggaccaaccctttgacgtagtgtcaccatcgatggccttggaagcggaggcaccctcctggaagttcaccgagaagttcgtgccagaggccgcggcgatgttcttcgcagcaccctgaaccggcgtcacgaatgcctgaatttcggtggcgttcatgtagtcgttgttcacggtgttcacaatgcgcaccttcgtggcattcactgtgcccttatcggccttgaacgtcaccgtctggcctgcggcaggcttaacatcgctaccgaattgcatccacgtctcgccatcagtggtgtactcggccttggcggaagccggagccttgtcaccatacgtgatggtcacgctgctaagctcacactcagagccgaagtcaatcgtggcggtcgggctggcggaatagtcaccagcagagttccacgtcacccaggcttcagctgacgtgtcaccatcggtgagcttcttccactgatcgcccttgctgtattccgtctgctggttggtcacggtcaggttggaagcagtgtcggccacattctcaggcgtggcggcggtgacatagatcgcgcccttcagtgcaatcgtggtcgcgtcgtccagctggtaagtaccggtcacggcaatgttgtcgccagccttggcatcggcgagcttggtatcaagcccatcgaagttccacgtaaccttagccgcatcgccctcgaatgcaggcgatgccttgacgtgtaggtacaccggcgcagcctcaagcgcggccttcgcctcgctcgcactggtgccggccagcactgtagccgataccggatcggaaacggtgagcgcgccaacgtagaccgtagcggtgacgttgaactcgttgccgtacacatcggtggcggtagcggtggcttcgtaggtgccttccttggccacatcgaccttggaagtatcccagttggcaaccgtggccttgccttcgccccaggtgtagtagagcgtgacttcgaccggaagcacggccttctcgttaacggcggtctgcacgttcacggtcttctggctggtcggcgttacattgcgcagagtccatgtctggttggcggacggcgaagtgccgctcggtgactgccacaagccaaccttcgtgccgactgtggtaccagagttatccacatcaaggttcgtcttagtcgcggcattgagcagctggtaggtcgaaccatcggaagtgttgagaatccacttggcagccgggtcggatttagcggccccaaccgtttcgttggaaagcgcgttcgtgccatccttggacaccagcaccttgccttcggcgttagtaatcacataagccttgagatcagggcgctcggagtcggtgggctgctcgatctgggtaaaggtccaagtctgcttcttggcgttctcggcatcggaagcgacgttggccagggacagcgcggaatcaccagaagtggtatcagccacggccttgccggactgcttaccaacgagctggtaagtgtcgccggtctcgacggcagcatccttagcgtagccggtcacgccagtgagctggatggaggcgatagaacgggcgggcacagtgaccgtagcggtcttggcagccttgtcaatcaccacagagccttcagcttgcttgacgttgctggtcttggcgaagacttccggagtggcggaatcgacacccacgttcttgtcttcggcagaggtttcggtggtcagatagagctcaccgtaagcgttgtcggcaatctcgccgtacttcgacaggtcgatgacgaaggtctggtcagaggtgccggagttgcggtggatgacggtctgcgtcttgccatcggcggaggtggcagtcatgttgttgtcttcatcgttgttggcgatgaccttgtcgcccgcgtggatgaagtgggtgatggccttgacgccgttgtacttggcgttggcaataaccgtgcacggttcaagtccatcggcggtaccgccgttgttgttcacgcgacgctcggagtagagcttgccgtccttaccggccacggtgcagtcgaagtcgatgagcacggtgccccagttggtgttttcaccggccgggttcacgttcgagcccatctgcatgttgtagaggtcctcgaccacctgccagaaggtgaagtccttggactgcaggcgggtgacgttggagctgatcttgctcatcatgcccagcgcgttgtcgaaaccgtacgggttgtaggagccggactgccaggagccgtccacctcgctcatcgacagcttcttgccgtctgcctgagcgatatcgcgcgattgcatctggttgctgtcggagtaggcgtgaacgttgtactggccgataaggtccttgatcgcctgcgggtactggttgtacgacttgacgaagtcggcggagttcgtggcatcggtggctgcgatgatggtgtcatcattgtccttgagcgcctcagcgagtgcggtaatcgtctgctgctgctgggcgttattgacatgcataccctcctgcggcttcttcagcgcgttggagtatggggtgacggacttatctttgtcggagtagtacttatcccagtagttgttaatgagcttggtgttgtcatcgctctcatcggtgtacttcgaagccatgtcgcccggagtgccccagtaactggtctcggactcgttgaacggctcgaccgtgtcaacgtttgcgccaaggctttcgaggtgctcgacgttcttggtcatgtactgagcgaatttctcagggtttgcaagattattgctaccagagttgtatccaccagtggcgtaaccgctgttggtcaggaaccacggagcggagttggcgaaggcctctacatcggtgatgtcggggttatcgccggtggcaccgcgctcaatccaccagtcttgggcggcggacttggagaagtcatactggttgtcgtcagtcgggtcgaatgccgcagccagcttgtctttgtcggcctgcttggtggttacgccattgccatacgtgccggagccggtggcgtcatctttccacgtgccaggcacggcagcgccttggcgcatgaatgggtagccgtaggcaacatcggaggcattgccgccgcccacgttgtagcgggccatgttcaggtccagtccttcatcaccgaagatggactggtagaactgttcgcgcagctgcttgccgtattccacagccttagccttggaagcgtcatcgccgagattggtggtgatggccgattcctcgccgaggctgccggtggcgttggcgaaccaagccagcgaggtgccccagccatcgaaactgttggcataccacgggttcggggtcacggtaatggcatcgttatcagccgcatacgcagtgccggcaaccgcaaacgcccctcctcccactagtgttgccgccgcaaccattgcagcaagcgatttgctcagtaccctcattggtctccttagtgttcctgctgtccgccttataccggaaaaatcggcctttgcttcactgagccggcctctttgcctgatacatgacctacgtcgactccttctttcggcgcagccaaaatgtttacgcaaacattttgatatgagcgattttatcacaaaaccgtcacccagcaaacaaccccgttgtctaaatgaaagtgcaacacccgttagattggaaattgcctagaaaaccagtccgaagggatgtcgcacctatgggagaagtatattcgcacctgtcggaagaggaacgccaggtcatccagatcgaggtaggcaacggcgccagcatacgcgggatcggcgcgatgctgggccgcagcccgtccagcatcagccgggagatcaagcgcaacacatggttcccgtccaacgagaacgagtcgtaccgcccgtaccggccgaaaagactgaaggcggggccatggaccggccgctactacatcgccgggcccgcgcagcgcaaggccgaccgcaggagatccaagccacgaaagccctaccggctgtcgcacgaccgcctgtgggcgcaggtggccgaatggctgggccgcggctggtcgccgctgcttatcagcggcaggctgcgcgtcctgtggccggacgatgcgctcatgcgcgtgtgcccggagaccatctaccgatgggtctactccagcaggccgcttcgggaacgctgggcgcggtgcctgccgcgagggcacaggcggcgccgcaggcacggcggcaggaggacgtcgcgcttcccgattcccggccgagtgcccatctccgaacgcccgccggaggccgacggcaggagcgcgttcggccattgggaggccgacagcgtcatcggagtgggatgcaacctgcacaccgaggtggagaggaggaccaggttcctcatggcccgcgtcgttccggacaagaccgccggcgagagcgtcggggcgcagctggacatgttctcgccgctgccggccggcgcgcgcgtcagcgtcacgcacgacaacggcaccgagttcgcccaccacgaaaggctgcgcgacgggctgggcatggccacgtacttcgccgacccgtactccagctggcagcggggaagcaacgagaaccgcaacggcatgatccgccggtatctgcccaaacgctgcgagatccggatggacatggcaaaggaggtcagggagatcgtcgacgagatcaacaaccgccccatgcgcgtgctcggctaccggacgcccgccgaggcgttcgccgacgaactgttagaattacaggaccaacaagggtgttgcacttctaaatagacatcgggcaacttcagagaccacaaacgacgcacaaagtcatgagccattcgaattgcgctggcccaatcgctacgaatcatatttgccgtagcccttaagtgaatcccactgcatcgagatatcgcgcccgctatcccttccgataacgccgaccacgcgtgttgccttcagcaatcagctttccttgcgcaactaaaccgtttaggaatttgcggactgttctgttatcgagctctgttatcttggcgagttcaggtacagtcacatagtcaacctctgtcaagcgtcgattcatcgccgacagcatcgctgcccgcgaatcaatttcacccgatgcggttgcatctgctttcttaccatccacacgttccccgccaatgagcctcgcaccctcttcggcatctttctcaactacagatctcacgctagcaaaaccagaaccatccacggtcttcagcgcaggaacaataggaatcgtcgcctcgaatatgtcaccatcgcggaactcaggctctcgctcagtatattgccgggacgctcttatcagattccgcagtccgctacccagctgctcggctatgccggtctgcacaaacacattagcgataatcggattctttggcattggcgtgaactcgcccagcttcattcgaccttcaaagaatgagcgcgaagcattaaccgtccggatggattcattattaatggtgacacgcgccaccaccggactggaatactcccgatgcatgaggctgtttgccaccaattcacgggcgatcatcgtacgcgggctcactcgcttatcgccctttaacacaaagcggtcaggcagattccgctcagtaaattcacggagttgctcgtacgaatcgaacaagttggtccgcaccataagccggtcatcgtatcggtcaatattgtctcgccgaaccacggcatcagtaatatacgctgggcaaaccgaggaaatgacttcatccttgcccaagagcagcactgcagcaagattaaagccctcttcgccggtcgtgtaatcacgatcgtatagcttggcgctgcggaacagttcttcgtcagacatagttccccaagggtgcccagctcgctgagcgaccgccagctgccgcattcgcgcaatcagctcaggacgcaaatcaaacggagtcacgtaacggaaaattcgccgttcggaatagtagttctgcttgcgaatatacatttgactaatctggatatcgctttcgatgtgtgtatccacatcagcaatgcgatcaaacactgcgcccttgaaccgcacaaccgaagaactcggagctacccaaatacgaacaataatccgttcgtcgtactcgatatgttccgtttccaccattggagccggttcgaacatcttacgattagacactacgttgacaacgttgcgctctatctcactaacgcgcttagaatcgacgccgagcacttgaccgtcatcgtcaacgccaagataaatgctgccaccagaacgattggcgaatgagcatacagtctcaaaagtatccgtatgaggcaattcgctgcagcgcttgaactcgaccatagatgattcaccggcctgcagcacttgcataagttcatcctgcgtcatcgcattccgcccttcatagcgataattcatacattaggacatggcacttatcgtattttagcatctaattagtacattaggacattgttttatgtcctaatgtactaattaggcggctaattgtactaataattgcacactgatgtactaatccgatgatcgaatgcactaattgtccgcacaaatgcactaatcggatgaccgaatgtatcaatgagacctataggcagccgattggctgacgatcagcccagtcattggctatcggccgctagccagtcagccgccaacagccaacagccacccaaccaatagccgccagccaatcagcccgtccaatcactccttgtgttccagtgcggccttcaaatcgcggctacggtagcgttcgcgcagcatagagaatccaccgaagcccacaagccacaccaggccggcaatcgcggaattgcgcgtatcgtccgcaaggaacaacgtcaggtagatgaacacgaagaacacgattgccaccgtattgagcaccttccaagcgggcatgacgaacccgtccggaatgaaatcagcggagcgacggtacttgcggtgtgccatcagcgtcaggatgtagatgaacaggaacaccgcggagctggcggacgagaacagcacgaacgctccggacacgccggggatggcgttgacgatcggcgacagcagtatcagcgccgcggacaccaggatggcgcgggccggcaccttgcgatcggacaccttgccgagcttgttcagcatcgggttcggcgacacctcggacagctggtacaggtggcggccagccgagtacagcagcgagttcagcgcggaagatgcggcggtgatcaccacgaagaacaccagcgcggacgcccaattcagcccggcgtactggaacaccataatgaacggggaggcaaaggagccgtcctcgttcggcttgaacgaggtccacggcacgatgcacatgatggccacgagcgcgcccacgtagaagatgagcacacgcacgatgatctcgttgatggccttgggcagcaccttgcgcggattcttggtctcggagacggtgacgcccacgaattcaatcatctcgtaggcgaagaacaccatctggaagctcatgaggaaggccatccaaccgttcggcgcgaacgagaagttggcgaacaggttgtcgaatccggcgtggccggccgggctcacgtggtccacgccgtgaatctgcacggctgggtaatggtagccgatcacgaccatgaccacggcggtggcgatcatcgcgcaaatcagcgtgatcttgatcatcgagaaccagaattccacctcgccgaacaccttgacggcaatcaggttgatggagaccagcgacaccaggaaacacagctcgatcagccatttccaatgggtcaggtcgatgccgaacgtgtcgaagaaggtgatgaagtacgtggagacggccgtgatctcggtcatgcccagcagcacgagcgcggcccaatacgtccagccggcgaaatgcccccacccgttgccaaggtaacgggtgatgaaattgatgaaggtgtgctggctggggtcacggtacatcatttcgccgatggcgcgcatcaggaagaacatgatgacaccgaccagaatgtacacgaagatgatcgaggggccggttagcgagattgacttgcccgagcccaggaacaggccggtgccgatggtgccgccaatggcgatgaactgtacgtggcgattgctcaggccacgctccatctcgttggtctggtccaggctttcgacagacttgagtttgcccgtagcctgctgtgtaccaccattcacattcgtatcggccatactgatttcatttctcttctctgccgcccgattgttacgcaccagacgcgatactcgttcaaaacaagttcaaactgtatcaccgaaatatgtcacgaaaaccgctcagctcaagaatacatgcgatgatactgtaaatattccgccaaaaagttcaattcatcaacaccaaattgaacttctacctctattccacggacttgagcgagctgaccgggtctacgcgatcgagcactgggttggtgaacagctgcaccagcagcgcgaacgccagcgtcgccaccacggcaatcgcatagctgtaccagtgcacttccacttcgaaatacagcgacggcatattcaacgcagcagtcagtaatccgcctatccacctgccaagcggcagaccaaccaccacacccataccggtcaatatcatcatctcgcggttcacgtagttgtgcacctcgcggtcatagaagcccagcaccttcagtgtggccatctcgcggatgcgttcggacacgttcgtattggccaacgtaaacagcaccaccagcgccaggccgccggcgagccccacaatcagcgccaccacggcacccatcaaatcgaacttaaacgtggcggccagatgcgcacagctcacggccttgagcaccgacgattcctcgcccaaccgatccgcatattcggcctgttcggtctcggaacctttcagcttggcgagcatcgcgttccacgtcaaggtcgaggcagtgccatctcccgaagccgaagacgtcacaccgtcggccgcaaacttctggtcgtacagtcgctcactgatgtacacatcagagccaataagattgcgcgtcaccgccgtaaccttcaccttggcccgcccgctgccgccattgctcaacgtgacggtgtcgcccgcatgaatatccaacgaattggctgcggacttcgccacaatcacaccactatcgtccagcgttacagtgccgccacccgctttgccgaagatattgggcagcccaaaccatccatcatcgccagcttgttccagcgtgaccatatcgttcaagatattcagcgaatcgttgggcacggtcatcagctgcacggtttcgctttcctgcgccgcattgctcatctcgccactatccacgcgcagattcagcgtttcggtggtttggccatcttgtgccacctgcttgcgcatcgcggtggcgtcatcgtcattggccacgaccatcaggtcgtactggtagatctgctcgtattgtttgacgccaatcgtgtcgacggtgtcattaatcgcaaatccgcagataatcaacgctgtgcaaccggccacgccacccacggtcataatcaagcgcgacttgaatcggaagatattgcgcgcggtgactttgccgaggaagttcagccggctccataccgggcgaatccgctccaacaatatgcgagcgcccgccttcggcgccttcgggcgcatcagcgcggcgggcgtgtgccgtatctcctcgcggcaggcgagcgcggtgaccacgcccacaccgaccacgaacagcacgatgccggccgagccgtacagccagtcgtattcaagtcgcacaccgggcaatatatacagcccctcaatcaccaccatcaggaatgccgggatgccgaggaatccgactagcagaccgatgccgccgccgaccaagcaggcgagcaacgcgaacagcagataccggctggacacggcgagtccgccatagccgagtccaaggtaggtgccgataagtccgcgatcttcctcgaccatgcgggtcatggtggtcaggctcatgagcacggcgaccagcaggaacacaatcgggaatgcgcggccgatggattcgatggaactgacatctgatttgagcgagctgaatccgtcgatcgaagcgcgcgtctgcacataccaacgtgcgttggccacatcgtcgatgcgccgttgctgcttggcgaattcgctttccgcttcgcttcgcttcgcatcgagtgcagactgcgcatcatccagtttcgccttgccgtccgcgagctgttgttcgccttctttcagctgccgctcgccttcttcaagctgctgcttgccgctggccagttgggcggcctgcgcttcaagttgcgccgactgggtttcgagggttgcggcattcgcttcgagttccgcggatttggtattgagctgtgcctctcctgcagccgcttcctgttccttggcggtcagttgcgcgttctgctggcccaaggtggattgtgcgggggcaatggtttcgtttaatgtgcgctgcaaatcggctttctgctgggccagactgtctcgctgcgtttgcagttccgtttgcttggcggtcagctgttgccgcagatcgctgattgacggcacttcaggcacggtaatgccaaggcgcgcgagcagttgcttgatggcctgccatgtgggtgagttgaggtcgatattcgggtcaagttgcgccagtagattgttggcctgttgaatcatgggcagcatctgatcaatttgcgccatgccttggtcgatttgggtaatgccctgttcgattttcgtgcgattggcggtcagttccgtttgcgccgcatcgagctgtttgcgagccgaggtgagctgcgttttgcctgattcgagctgggtgcgcgcttcggctatctgctggcgaccttgcgcgatctgttgacgggccgttgcaatctgcgcacgtccatcggcgagctgccgttcgccatcggtaatggttgtcctgttgttctccaattcggtacggctatcttgcaatgtcgtttcgttggcttccagctcggcccggttgtcgtcgatctgcttctgggcttcgtccagctgctcgttggcctcgtcttgggcatcgtccagtttgcgctgcgcgctggagacgatctgttgacgacgggctttctggcgtgtggtctgtatctgatgttcgatacggtcggccacggttttgacggcttcatcgtaggcatcggaaaacgtgtcaaaatcggacgcaccagtgacggcaaccgatatcgcagtgtatatattgccggtcacgccgtcgctgggtgcaaagaacgtatagtcctcggatgaggtggaccggaaggaggtcatgcccgaatagccgtctggattgttgaggtcgcgcgggtcaagtacgacgccggtgatggtgagtttcgtggggaactgcggggattgctcggcgtcggcgtccgtattggcggcggacttcgcatcggatgccgaggcattggcggcgacacctaccgtatcggcattattggaatcgtcagtctccgtggccgctaccgatatgacggatgaagaagtgtcttgtggcgtcacagtaatggtgccgccaatcttgagtccgctatcgttcaggaattgctgcgtaaccgccacttcgccggccttgttcggcagtttgccctgccgtatgtacggctgatcaagcccttcggtaccgatttcctgcatggtcacggttttcttggtgccgtccaccaacgtggtcaccgtctgagaacgttcgggctgcacggtttgcacaccgtcgattcggcgcagtgccgttgcatcatcatcggtcaggccgtatgtggatagcacctgcaggtcatgcagtccctgctgatcgtaaaaacgaccggccgccagaaaagcatcgcggcatccggcgtagatgccggtcagcacggccacgccaagcagcgtgatgacggcgatcgagacgaacctcttccagctgcgcagccagcaacgcaacgtatctttggcaaataccgcagaaacgcccgctcctcgaccgccgctatcgtcgaggttccgccgtttcacagaatgtttcacaggttgtttcacgaatcgcctcgcttgtttcacggggcgtttcacagagtgtcttgcagtgagcatcgccaatcacctaccattcgatatcggcgatgggccgcggcgttgcgttgacctcctcgctggtcaccttgccggagcggaagcgaatcactttgtgagccatcggtgcaagcgcggaattatgcgtgatgatcattacggtcatgccttgtgtttggcaaatatcctgcagcaactgcagcacttccttgccggtctcgtaatcgagcgcaccggtcggctcatcgcacaacaacagcttcggctttttggcaatcgcgcgggcgatggatacacgctgttgttcgccgccggacagttgtgccgggaaattccccatgcgctcccccagtccgaccttgtacagggtttccgccgggtcgaaatgatcggggcaaatctgtgaggcaagttccacgttctccagcgcggtcaggttcggcacaagattgtagaactggaagacaaagccgatgtcgttgcgccggtaggtcaccaaatcgcgcttacgcaatccggtgatgtcgcgatcgcccacaatgacgcggcctgaagtcgcggtatccatgccgcccagaatgttcaacgccgtggtcttgcctgcgcctgactggccgaggatgacgcttaactcgccttgatcggcggtaaagctcgcctcatcgagcgcccgaatcacgctgctgccggaggggtattccttgaccacatgatcgaattcgatatatgccatcacgcacctccaacagttcccaccacggcccgctccattcgcaatgccacctgcgttcccttgctatactcaagtaaaacaacactgtgtcggttctgcaaccaacagttggattgtgagttgtcggaacttggggagaatgccatggccaaggatttgacggaaagccgccgcacccgatacacacggctcgccatgcaagacgcgctcgtcgagctgctgcaggaccagccgcttgggtccatcaccgtcaaggcattgtgcgagcgggcggacgtgaaccgttccacgttctatgcgcattacacaagcattgaagatctactgcacgatatcgaagacgagaccatggcctgggttactgccgcgctcgaccagttgctcgcgcagcctgattcagccggcatcgagcacgtcatcgaacgtatctgccaatacatcgccgacaatcgcaagcatctgcaggtattgatgagcccgaaagcagatatcggcttccaacagcagctactgggacttatttacagccggcagacagtcgccgagcagctgcagcccgccgccaacgacccggtcgaggcccaaatgcgcatgcgcttcgccgtatccggcagcatcggcctactgcaatactggctcgccaccgacctcgcagcatctccggaatcagtggcccacaccattttcaccatgggcatgcccgtctcgcagtgaattggtggggatggtttgataggccactgccgactttagctgtttcgatcaaacgcgaataccggtatgggctggcatcggcattctttggcattacggcatgccgcgccttacaatgacgagcgttgcgcatggcgacctcccgccggtcatgctaaaaatcaaagagactcgagagaagagcacaatgagtactgctgatgcgcctaagaagccgcgcgaaaccgacgacgtgccggtgccggccacgctgcgcaagtcactgaagaaccgtcatatccagctgattgcactgggcggcgccatcggaaccggcctgttctatggttccagcgaatccatcgcgctggccggcccctcgattctgctcgcctacttggttggcggcttcgcaatcttcatgatcgtgcgcgcgctgagcgaaatgtccgttgaggatccgaaggcgggcgcgttcagctactacgccactcgctactggtccaagcgcgccggcttcatctccggttggaactactggttcaattacatcctcgtctcgatggttgagctgtccgtggtgggcaaattcgtaaactactggttcccggcgattccgacatgggtgtcggcggccgtgttcttggtgattatctgcgccgccaacctgctgggcgtctccaagttcggtgagttcgagttctggttcgccattatcaagattgtggccgtgatcgccatgatcgtcggcggcctggccgtcatcatcttcgctctgcccaccgcatccggcatcaaagcgagctttgccaactggttcaccttggaagggggcttcttcccgaacggtctcatggagcagactaaggacggcacctggaccggcctgttgatggcgcttgtcgtggtgatgttcagcttcggcggcaccgagctcatcggcatcaccgccggcgaaaccgaggaccctcgtcgtacgattccccgcgccaccaatgacattatctggcgaattctcgtgttctacattggcgcgctcggcgtaatcatggccgtaataccgtggaacaccatcggcggagacgatgttcccagcccgttcgtgcaaatcttcgattccgtgggcatccacgcggccgccggcatcctcaacttcgtgtgcctgaccgctgtgatgagcgtctacaactccggcctgtacgccaactcccgcatgctgtattcgctggccaaacaaggcaatgcacccgcgtatctgggcaagctcaacgctaagggcgtgccggtggccggcgtgctgatgtccgccgtgatcaccgccatcgccgtggtcgtggtgttcgtgtggcctgagttcgcgttcaactatctgatgtcgattgccaccatcgccggcatcatcaactggacgatgatcatgttcaccgaaatgaagttccgtaaggtggtcgccgcgggcggcgctcccgaggattccgaactggccggcaagtccggcaaggaagcgctcgacgcgattcacttcaagctgccgttcgccaaagtaaccccgtgggtggtattggcgttcctggcactggtcgtggtgctgatgtgcttctccgccagctaccgcgtcgccgtcatcgccggcgtgatttggctcgccatcctcttcgccgcctaccagctcactcaggcgaagaagtaaggctccatttgcgaatagctctcactgatgagcactcagtgagagctattcgcaaatgggatttattcatgaaacagctcatcgatgccgacgagctgaacgtcggattgagacgccgcagcatcgtcgaccagtgattgatcgaaaccgccgagcgaaaacagcaggtatgttcgctggccgataccggttcgcgcagcacggtctcgcagtagattcagcacggaacggtccaccggcgcattgcggaatttgcactcgcccacaatggcagcatcagacgcattgtcaacggccatcacgtctatctcatcctgacgatcccaccaacggccaaccgcacgcgcacggaagggcaaccgtccagcagcactctcacgccacatccattcacggcacagaccctcgaacggtttgccggcaaaattatgtaataccggcttgatatgacgctcgtatacgccttccacatcgccccgctccaattccgaacgatacggaaagacaaacgaataccagaatcggaagaaattgtcgctcagctgatacagcccacgcgaacctttcgcccgctccttaggcttcgccgtgactgggaactcacgttccacaatccccagttccataagattggcgagatacgacgatactgttgcgtttgccatcatcgtgtgtgtcgcgatctcattcagcgaagttgcgccgagcgcgatcgcccgtatcacgctgttatatttcgcagtttcccgcagttcttcgtgcaacaaaaattcaacctcgctgtatagcggagcaatgcgtctcagaatatgccgcttgacatttgcgtctatggtctcatctgggtcaaattcctctaggtaacgcgggataccgcccagtattgcgtaggccagcgccttatcctcgccactatagttggggaagaattgcgctgcatcccaatatggcatcggcagcatcttcaggatgccggtcgcacgaccatatagcggcgatttttctcccaacagctccttttcgatgaagctcatggcactgccgcaaatcacaatcatcagatttgcatgacgcaacgtgtggtcccaaagattctgtagcactgacggcaatgacggatcagatttgaccagataaggaaactcatcgaatatcacaagcctgcggccgccatcgctcggctctggcagccgggttaactcggttaacgccctttcccaagaaggatattgactcagataatccttgcccggggcacccgcctcgaacatgagacgggagaacgatgccagctgttcatctttagtggcattctgcgccgcgaagaataaggtttccttgtcttttgcgagttgaataagcgtctctgtttttcccacgcgcctgcggccgtagacgaacacaagctgtgccctacgctcagtgaaacattcctgcagttgcttgaggtcatcgtctcgtccgatgaatgccatgctgcccgcctcctttatgccatacgccggcgtatttctatcgcatcacgatttattgtatcacgattagtataatcgtgattatacaagctgtgacgaggtgcgggtacgggccaatttgcaaaaaactctcactgagggggaggtggtgacggctttgaggtcgagcttgccgcaggtcaggtagaccatggtggcgaagtagtccatgtcacggaagccgcaggcccgtctcttcacgttccggacgacgctgtcggcgccctcgaggacggcgttggcgtacgggtgctcgaagtacgcgacgacctcggcgaagcggcggcggaccagacgggcgggttccttcacgggttcgagcctcgagtgtatcatccacgagcacaggcggtatagcctgacccatgccccggcgggcggtgtttttagtcaagtcggtgtttcgtgttgggggcggtgacgttttgttggacttcgttgtctgtatggtcgttggtcagtgtaccggatggtttcaggcgacgagcccgagctggatgcgtttgtccatgatgctcatgccgtattcggtcttgatgcgcttgtcgcggtaccagaccatgtactcgtcgagcatcgcggtgaactcgtcgatcgtcacgccccggaagctcctcttgtggaagaactcctgcttgagacggccgaagaacccctccgcggccgcattgtccggcgaacagcccttcgcgctcatcgaccgggtcagcccgtgctcggtgcagatgcggatccattccggccaccggtaatggcaacccctgtcggaattaaaccgacatcggtttaactccgattaagccggttttgttgttaagccggggaacggttcggggtcttggtggctggccgtgtcccatgtggtttcccggcttaacgttccgggttatgttcgtcttgtcccatttgattcgaacgaaggagtttgccatgggtgagacgacggttggccatgtcgcgggcgaggtggtccgcgcgctttacggggccggttatatggaatccaccataggccagtaccgcaagtccatcagggcgttggaacggtacgccggaggcccggatgcggtgtacacgcgtgggttgggcgcggggttcgccgcgtcgaccttcagtgagcggacgggcggtttcagcaggcagcggtggttcgattacggcaggctggcgcgtttgtgcgactcgtatctgcggtccggttcggtggacctgggcaagtggcgcaggagcaggcttgcggagccggtggttccgggtttggccgtggtcatggagcgttgggaggcgtatctcgccggttcgggactggcttcggcgacggtggggcattaccgtcggatggcgggcttgttcctcacgtggctggaatctcatggggtcgtgtcgttggacggttcggatggctcgcatgtgctggggttcctggccgggctgcgttcacgctggtcggagtcgtcgatgcggcacgccgcgtcggacctgcgcccgttgttcagatggctcgggcgggatgacctggcggacgcgatcggcctggccggcatacgcaggacccacgcgatcgcgggaacgttgcccgacgacgagcaccgccgcttgctggaggcgtgcgcctcgcggtcggtgccgtcgagggacgcggcgatcaccctgctgtcgctgacgtgcgggctgagggcatgcgatgtgatcggtctgaggatcgccgacgtggattgggattccatgagcataggtctggtgcagcgaaagacgggcaatccgttgaccgtgccgatgacgggaccgctggccgcgaggctggcgtcctggctgttggacgaaaggcccgccaccgacgacgaccgtgtgttcgtgcggtacaaggcgccccatgtcgcgcttcggggtcattcatcggtgtacgaggcgatcagccgtgtcatgcggcacgccgggctcggacgccggggcggttccaggctgttgcggcgcaacgcggcgacgaggatgctggaggcggccacgccgttgccgacgatcagcgcggtgcttggccacgccgaccccgattccacacgcgtctacatggccacgcaccgcgggggaatgctcgcgtgcgtgctgcccgtgccggaaggcggatcgtcatgagacccacggaacacggattcgtcggcccgctcgccggcgaattggaggagtacatccgcttcaaggcgtccatgggcaggcatggcgccacccgcgtccgggtcctgcgctcgttcgaccggcattgcctcgaacacggggccgtgcgtctggagcggggcgtcgtggagcgatggatcgcccataggatcgacgcgaatcccgggggttgccgctcgtggttctcgtacatcagggacttcggcaggtggatgcgactggcccacgatcccgacgcgtacgtgctctccgaccagtggaaggccggatccccgcgtccgacgccgtacctgctgacggaccgcgaggccgccctgttcctgcgggccgcgggaacgttggagtctccgtcgccgtgggcgtggcagtctcgcgcgttcttcatgctcatggcctgctgcgggctgcgcacccgagaggtcaggagactcgccgtcgggcacgtcgaccacaaggcccgttccatcgacgtggtcgattccaaggccggtcgcagccgcaggctgcccgtgggcgacgaggtcgccgccgaactgctggaatgcgaccaacggtcccgcgaacgcttcggagacgaccgtcccgcgttcttcgtcacctccaccggcaatccggtctccccgggcatgcccggcgtggtgttccgccgcgtctggacgcgtgccgggctcgagtggccacaagccggcaaacggcccaggccctatgatttccggcaccggttcgcgttcgcgaacatcgagcggtggactcgcgacggcgtggacgtgatggcgatgctgccctatctggcggcctacatgggacacgccggcatcgacagcaccctctactacgtgcacgccagccccgatttcatggacggatacgcggacctcgtcgccgacgccgaacgcgtggtcccggaaacggaggaaccatgagcaaggcaaggaaaacggccgccagctccggtgaaccggacttctggcgagtcgcgcgcgactggctgcaccactggctgcccaaggtgcggggcagctcgccgaagaccgtcgaggcgtaccgcatcggcctggaatcctacgtccgatggctcgaaaccacggaaggcacgcagcgcagccacatcggtttcgggcatttcgaccgggcgcgcctgggccggtgggtcgaatggatgcggaccgagcgcgggtactcggaccgcaccatcatgctgaggatgacgacgatgcgcgtgttcctcgaccacgcgggcctcgaacacccggcattgaccgcgctgggcaacgacgcggccggcatacgtgtcaaaccacccgcgcgcaaacccgtcgaccacctcggggaggagcacgccaaagcgttgctgaccgcatggggcaccggcgacgccaaatcgcgcaggaaccgcatgctcctgatcctcatgtacgacaccgccgccaggatcggcgaactcgccgcactgaccatcgcggacgtgggtatggataagccggccagggtcacgctcaccggcaaacgcggcaagagccgggtcgtgcccctgggagaaaggacacgaacccacctggccgcctacctcgaggaattccatcccggaccgtccatgcgcgacggcgacaggccgttgttccactcgacgaggaacggcgccatccagccgctctccgtggaccggatcgacgagatcctcaaaaccgcggcggccagagcacgccgcgggacgtgcccgtccatgcccgaacgcgtccactgccacctgatccgccggacccgcgccatggacctctaccaacagggcgtgccgctaccgctcatcatgcaactgctcggccacgaaagcatgagcacaaccagcgcgttctacgcgttcgcgaccctcgacatgatgcgcaaagccgtcgatgcggccaaccccggccccgacccctccaaggagacatggctcagcgagcaacgactccgacaactacacaccctcaaataacccggaacgttaagccgggaaaccacatgggacacggccagccaccaagaccccgaaccgttccccggcttaacaacaaaaccggcttaatccgagtggatgatcggcgtctcgccgggcctgagcgtggcgcacgcgtcgcgaagcatgccgttggccagggcggcgttggggctcgtgccgatcgtccaggcgaccggcatgccgtcatggcagtcgatgaccggcgacaggtacaccttgcccgccgggatcgagaactcggtgatgtccgtgacccacagccggttcggcgcggtggcgtggaagtcgcggttcacgagattcgcgggtgcgccgccgatctcgcccttgtacgaactgtagcgcttcgcgctcttgagcacggggaccatgccgtggctggtcatcaggcgcatgatgcgcttggccgacacgatgatgcccgcgcttttgagctcgaggtggatgcgcttgtacccgcagcgcctcctgctgctcccgaacgcctcgcgcaccagggacaggaggttcgcgttcttgcccggccggcgcatggccttcaactggtagtagtacgtgctgcgcgcgatgccgacctccttcagcaggctctccgcgttcacgcccaacgtctcactgatgtccttgatcagggtcgtcttctctcggcttgtcaggttgtccgggtctgcgcccggctcttttcccaccagttccgccgcacccttcatgatcgccaaccggatctccatggcccgctgttcggcgcgcagacgctcgaggtcggcgcgcaacgcggcgatctcgccgcgcagcgcgtccggatcgtcctgctgcgaggaatccccgcgttccggttccctcttcgccaccatgagtcctttcgcgtctccgagcagttgacgcttccagtttcgcacgaccgacgaatccacacccaccgcctccgcggcctcgcgcgaactcaattcaccggacgcgaccttcaggaccgcatcccgtttcaattccccgggaaccgggccacggcgaatccggcgttcgcccggcgcgagctcgtcgatccacgaggcaagcacctctttgctcggataccccatctgacgcatcgtgcggctcgcacgccgcccatgcgtcagataatggtccacggccgcacgcttctgctcctccgtgtagcgcgcataccgttcaccacgctgcgaggacacgcccgtcccctgttcgtcgagccagtcccggtgccacatgcgcaacgcctcccggctgggataccccagctcgcggatcacatccgccgcgcagcactcgtatttcacatacaactcgaccgcgcgttgccgctgttccctcgtgtacttcgccatggccgtctcctcctcggatcacagtccaagaaaacggcaccacccccgtttcgtcactaatttttggcctttcgctgtttgtggtgggtggtttgggtgcggggggaggacggtgcccgccccgtgggccaggcccggcagcgggttcacgctcctgttcgaggcgtgggccgtggagatggcccgccacctgcccgccggcacgctcgccgagcaattggacgagaccgacacccgtttgtggcggttcatcgcccattacgtcgacgaggcgaggaggctggaggactacatgggtgtggaggccatcggcatcgacgagaccagccgcaggggccgcaattacatcaccgtggtcgccgatctcgtggagcacgatgtcatcaacgtgacgccgggcaaggacccggccacggtcgaacggttctcgcgtgatttcatggaccacaacggggtcccggaatatgtgcgtctggtcgcctgcgacatgagcctgggcttccggaagggcatccgtgagcatctgccccatgcgcggcggatcgtcgacaagttccacgtggccaggcacgccaacgaggccgtcgacaaggccgggaagacggaaggccgctccaacccgctgctcaaacggaccaagtacctgtggctgcgcaacgaggaaagcctgaccgaactgcaggtggagaccaagcgcaacctgacgaggcaacggttgaagaccggccgcgcctgccggatgcgcgaggtcctgcaggacatctacacggacagccgcaccccgtccgaggcatgggtgcgcctgcatcgcctgtgctcgtggatgatgcactcgaggctcgagcccatgaaggacttcgcccgcatgatccgacgccacttcgccgagatcgtcgcctacttcgagcacccgtacaccaacgccgtgctcaagggcgccgacagcgtcatccagaacgtcaaacgacgggcgagaggcttccgcaacatggactacttcgccaccatgatctacctgacctgcggcagactcgacctcaaagccgtcaccaccacttgaccattacccaccacaaacagcgaatagccaaaaaaatgacgcatgtgctgttatacattaaaacgcacagaaaatcacacatatactgtgcgattttctgtgcgttgcagtgagcagctactcagttatgcgcggcgcttgcgccagatggacagcgcagtgccggcagcggcgagcagcaccatggcaccgctcacgccatatacggcggcaccggtggccggcaacttgccgtcagacttggtgtcatcggtcttgttgtcggtcttgtcgcctgcgttatcgcccttgttgtcaccatcgccggtatccggcttggtgggcgtttccgccttctgcaatgctgcgatggcggcgctcagatcagcggcggccttgtcaaccacagcctggtcggaggaagcgagcgcagccttggcggcctgcagtgccttggcgagcgcagcccaggaatcagccgtgtagtcggattccttgagcgcttcggcggcggcgatctgcttgttgagctcagccaaatcgaccttgccctgttcaatgccgtcaaccgtagtatcggatggattgaccaaaccatcggtgtagccgtcgtaagcaaccgcaacagtgccagagacgctggccgggagggtcacagtggccttgccttcggcgtcgagcttcacggtcttggaccagtcgccagcagagaacttcaccgaaccggcgagcgtgcccttatcggcggcggtcaccgtggcggtgagctcgcgggtgccggcgttgtactcggccttggtggtggagtcaacagcctcgatgtgcgtcgggttggcagcggtccaggacttcgtcaccttgagcacagactcaggcacgttcacgaacgcaccgtgacgcaccttgtccggcagaccgccgttagcaccctgagtgatgtagccctgagcgcccggctcggctttgaccggcttcttttcgttgttgaagtccgggtaacgcttggtcatcgggttgtcccacgtggtcttggaaagctcggcacccgtggtcataaatgcacggtaggcgaagttgtcggacagcagaatgtagccgtcgtcgtccttcgtgttgagttcgtcatccttgttgagcttgatggtctctggtccttcgaacggcagcaacgcctgctcgagcagctgccaaccggtgttcgggtcctgatccggagatgcctcggtggtcggtgcagtcagcaccttggaacgctcaaggaagatgctcttaccagtggtgatgtaatcgccagcggcaccgccctgctcattcttggtgaatcggtagtagtagccaccgatcttacgcacggtggaatcaatgcgcgagtagccggtgtcctgccacatctgcggctcggtgaagttcacgaagtcgcgggtgatggcgtaacgcacctgagcataggagctattgccggttttgtcgttcttgaccggagtggtacgggtgtcatcagtgaacatgcgggaagagaagaacaccacgtaagcgttcaggtcatcatcccagtaagcttccggtgcccaggtcataccggcgttcggcgtgttgatggtgatgccgccgttgccgtcgccgttggtacgggtccagttcatcatatcggtggactcgtagacctcaactttccgagaaccgttaacctggttctggctccagcccattgacgagaccttgagatcagtggcaatcaggtagtacttgtcgccttcgtgggaacgcagcacgaacatgtcacgcaagccacccgtgtcggcatcattggtaagtaccgcctggccattgttgcgagtcttaaacgtgaagaaatcgttcttctcagtggaagccacccaggccttttctccaccgttgctgtcgctctcaaaagtgacggccgcatagccggtgtcaggcgcgatgcgggtcttctccttgacagtgacctcgatggtcttggtgaccttctcaccgccgttgtaggaagcggtggcggtcagcgtaaccggcttggaatcaccgtcgccgtaggccggacgattgatgatgccagcaccacgatacgggtcatcggcaccagtggtcttgttttcgtacttctcgttagtggacgtaatgagcttctcgtccgaggacttccacgtaatcgccgagccgttcttggtgcccttggcgactagcggcagattctcggccgccgggactttcagcgcagcaatcgcggcatcgaggtcggctgcggcggcgttcttggcgttcatcggctcaacggtgacgggcagttcggccttgacgccacccagctcagtggtggcggtgatggtggcagtaccagccttgacgccggttacggtaccgtctgcggcgaccttggccacggactcatcggaggaggaccaggtgacgttcttgctcacggcgtcgtccggagtgacggtggcggtgagcttggtggagtccttctcaatcagggtgagcttgttgttcaccacaccggtgccggaaatcgcaacggcggtcggcatggtcaggtcagcgcccctgtagaccttgatgtcatccattgcaccattccagtactcatcgacggagtagaacgacttgccgatgtaggtggtggtcgcgccgagatcgctcatcttgatgccggtgttggccttgaaaatgatcagggcattgttgcggaacacggcaaggttggtgccgtccacgacaatcttgtaatcggcccagctgttgtcgttgccggaaacggtgaccttggatccctgttcgttaccccagttgttgttggagataacgcccttgatggcggtcttgctgttgtagaacatcaggtacttgttggcgttggcctgatcggtggtgttggcgtcgttcgagccgtccttgccgacgatgaacgagaagaacttgccgctgttgtcgtgacgagtcttggacgcgaactccagagtgaaggagtcgcccgcatccttgaacagctggtcatcgatctgggcgtactggccatcgccgcgcagtgagagcgcctcgttgttgctgcggtcaccgtactgttcgatcttggcgccgtccttcagcgtcaggttgtacttgccggtcgaatcggcaatcgcgctgttcgtggtgccgtttttgcccgtgaagtcccagctggcgagcagcgtcggttcagcagccttagtagtctgcactgtcgcggtatcggttgtctgtggttgggaatcttccgattccatggcatacgtcgtcggaactactgccaccatcgttgatattgcaatcaacgatgctgccatcttcttccaatgcttcaccgcatctctccttgtcctttgcctcgacccacttgtcgagtgtctcgttcgcctctacgtgaacgcaaacattatttgcgatgataccattacggcactgagactcagtgtgccagattccttatgtatataagcacttacgggggcagccgcccagcccgaacactccccgtatgtccaaaagcccccttccaagccaatcactaatacccctcaatcggcaccccgctccgccagccgccccaaactgttattaatttgttatctttaccgcgcttgcgtggacagagagcgctcagacctcgaagatcgccgcatattcgtgagaacccgcctagtcaatgagatatggcttgaagacgcgctcggtgacggggatatggagcatcagcatggtgccgtaaccaaggatcaccagcaggaacagtccaccgggcatgtggaaccagctggccgccagcagtgccacgaacacggcatccacgatgactagggccacggtcatcgcgatgtgggagatgccgaagatgaaggcgttcttcaaggtgccggccacggtgttctcgaagcgtgcctgaagcgcgaacacccattcgaaaccgataagccagaggatggtcagcgcgaatttgatgatgagcagcggcgtgatctgcaggacgatccatgaccagaccagtgcaatcagcgccaccaagaacggcatccacagcagtgtggctttgatgaagttggttttgaatgacttgaagtagttggcggttacgcctttgccctcgccctcgatggagcggcggcaagcatcatggccggcggtcagggctgcaccgatggtgatgagcggaatagaggtgaccagcatcagaatgttgatccatacgccgtcaacaagattgctccacgcgcgcatgaatttcgagtccggtgccagccagttcatcaactactccttgtacagcttttggctcccctcagggaggggagccaaattgtcgggctcaacccttgaccgcgcccgccatgacaccagagactatatacttctggcataccaagtagaagacgatgatggggatgatggccagcaccaggcaggccatcatggcgcccatatccacggaaccgtagccgcccttgaggtattgcacggcgaccgagacggtcttgtacttgccgaggtcgagcgtcaggtacggcagcaggtagtcgttccagatccacatggcttcgaggatggccaccgagacgatcgacggcttcataatcggcaccacgatctggaagaagatgcgcggcactgacgcgccgtcgatcatggcggactcctcaagctcctgcgggatgcccttgatcacgccagtgaagatgaacacggccagaccggcaccgaaaccgaggtacacgatgcacaggccccacggggtattgagcttcagcatgtcggcgatcttggagagggtgaacatcaccatctggaacggcacgatcatattgaacaggaacagggtgtagagcagcttcgcggcccagttgttcacgcgcacgatccaccatgcgcacatcgaggtgcacaccagaatcagcgccaccgagccgacggtgataagcaacgtccagccgaaggaggcgaagaactgcgtggtctcgatgccgcgcacatagttctcaagtcccacgaacgccttgccggcaggcagggagaacgcgttcttggagatgtacgccttctgcttgaaggagttgatcagcaccaggacgatcgggaaaatccagaacagggagacaacggcaaacagcacggtccataatgcgccatgcttcacaggcttgttctcgttcatcaggctgccacctccttgctcgtggtgagcttgttctgaatcagggcgatgaccgcgaccaggatgaagaacagcacggccttcgcctggccgacgccttcccagcccatacggccgtagaaggtgcgggtgatgttcagcgccagaccttcagacatgttgctcggcgcaccgttggtcaatgcgaggttctgatcgtagagcttgaaaccgttggtcacggtcaggaaggagcacacggtgatggacggcatcatcagcgggatgatgatgcggaacatggtctgccgtccgttggcgccgtccacggccgcggcctccagcacatcggtgggcagggcttgcaggccggcgatgtagatgatcatcatgtagccgatctgctgccagcacaccaggatgaccaagccccagaacccgtaggacgccttataggtcagggcgcggccccagtgggctagtacgccgttcaggagcagcagccagatgtagcccaggatgatgccgccgataaggttcggcatgaagaataccgagcggaacagcgtggagcccttgatcgccttggtcagcatgtaggcgatggcgaaggcgatcacgttgatcacgatggtggtcacgatggtgaacgcggtggagaagccgagcgcgtgcaggaattccttgtctttcaacgctttgccatagttcttaagccccacccattcaccgtcggtaacggtggtgaattcgcagaagcttaagtagacgcccatgatgaagggcaccaggaacccgatgatgaatgcggcgaatgtggggagcgcgaacagcgcccaccatctgcgtatcgccttgccagccatgctgatcatgacttttcctcctccttgagtccgctgcgttgtgacactgcatcgtgcgccggctgcggagttcaactcaatgcgagcttgccgatcgagaaccgcatgcacggcctgttctcgttcaagcctatgttcatagtaaacgtcgaatcattatatgtcaaacgttgtcattttaggcgtttcaagttcgagcacactccggctccagcaatcttctttcacctaagataatggctatataaagccaatctaacgccgacatagacactttgcaaacgtttgtaatacaatcgttgtcatcgccgcagatcaatcaatcagcatgtacactggagtcagttgtgcatgtgtattgcgattttccattcaacgcaagggggctgcaatggctacgagcattcaggatgtcgcccgcgaggccggcgtctccatctccaccgtctcacgttccttcaccaggccggatctggtgtcggccaagacccgcgagcgcgtgctcgccatcgccgacaaactcaatttctcactctcccgctcggctgcggccctgaaatccggccgctccctgcgcatcgcagtactgatgagcggccatatccgcctgtggttcaccgcctcggtcatcgaggggctcaacgaggtgctgcacacgcagggctacgatatttcggtattccagatttccagcatcgaggagcgcaaggaattcttcgagatgttgccggtacgccgtaacgccgatgccgtgattgtggcgtctttcgatatcgacaacaacgaaatcgcgcaactggcttcggtcggcgtgccgatcgtcggcatcaattcagtcgaacccggagcccgcggctttaccgccgccgtcaatatcgacgatgtgcagggctccacgctggccgcccgccatcttatcaatctcggacatcgccgcatcacctacatcagcaccaatcgcgaggtgtcgctgagcttctccgtgcaaagccgattcgactcattcaccgcctgctgccgcagggaaggcatcgagccgcaggttatcgtctgcaaggtcgatgacgatggacgttatgaaatcagcgacgtagtcaaccaactcataagccaagacgagatgcccaccgccatcgcatgccaggaggatggcattgctttgccgcttatgttccagctggagcgcaatggattctccgtgcccggcgacgtctcgttgatcggctacgacgatagtttctacaccggcgatatcggcctgaccaccatccgccaggatccggtggaaatggcccgcgtggcagcccgcatgacgctcgatctcattgacgaaaagccgattgagcaaccctacatcgtgttcccggcccagctgaaggtccgctcctccacctcccgcgttaagtaggctcacacaacaaagcccaccatagaaaaagtgtgaggcaaccgcacagtaacgctcaatcgcacattgtggagaatggcgaaaaatcgccgattcatggccccacagtgtgcgattgagcgggtgcgtgcctcacacttttttgcggcggacgattttgtgcgagactcagcaatacaaagcggcgcccccggagaaggaaatggcaggggcgccgcggattgttacttatcggctatgggactctatgagactcagtgcgaagcctcgtattcggaagcccaaccgtccacgaaggcggtcttgacggcatcccacttgccggtgccctgcgcgtactcgagcagtgcctggccgaccttgttcttccactcttcggacggcatcatggtgaagttccaagaaacctgggtcgtgccggacttctggtcttccacggcggcttcggtcagcgggttgtcaaacttgacgtcatcgaaggtcttgaacggggtggtgaagcccatgtcctgagagatggccttcttgccggtgtcggaggtgatcacccaggagaggaagtcctcggtggccttcttgtcggcgtcggaggccttgtcgttgatgcaccagtagttctcggaaccagtggccaagccctgcttctcttcacccttgacaccggtgtagattggcatcatgcccacggattcggccttcatgccggccttctgcaggtcggtccaagcccaggtgccgttctggtagaaggcggcctcgccgagcgcgaactcggagttcgcatcatcgccggtcttggcgctcagctgggtggggtcggtggtggagtcggtgatgtacaggtcgaagatcttcttgtagttcggcagataagtgcccttgatggtggccggctgctcggtgacgttgtcgtccttgaactcatagtagagcggcaggttggccagatgggtcttgaatcgccagtcggagctggagtcgaagccggcggaggtgaacgcgcccttgatgccgagctcgtccttgcgggcctgcatgtcgtcggccacggccttcagggtgtcgaagttgtcgatttcgtccatggacgtggctttggcaccatccagcgcgaagtacttgttgaggatgtccttgttgtagatcaggccgtaggtttccatcacgtacggcacaccgaccaccttgtcgccgtctttcagggccacgtcctggttggtgagttccttatacacatccgtgttggacatgtcggcggtgtacttcttccagttctggtagccgaccgggccgttcacctggaacaaggtcggggcttcggttttggcgatttcggacttcagggtctgctcgtaggtgccggaggccgcggtctggaccttgacatcaacgcccttctccttggtgtactccttggccagagcggcccactgatcagccgcttccggcttgaagttcaggtagtagaccttgcccttggcgtcatcgccggaggtcgagcttccgcaggccgccaaagtgccgagggacatcgcagcgatagccgccatcgcgactgctgacttgactgtacgattcatcatcgaacctttctctttcatcgtcgacccggccgtccccggtcaggacaggtacgctaacacgcacctttatgactatcgacatgcactattgtgcaacggtttgcttctttttgcaaacgatagcaatatcggcgcgtcataaatcatcattttcaggctattgtcaacaaatatcccattaattcggtcatttttgcctcattatcgcaatgcaagcgttcgcaattatgagagcgctaacatatctttcatggcaatcgattgccacttatacccatcaaaaaaaacaacacggcgacgctatcgtttgcaaatcatttatcgacataccgcaattcccaccacaaacaataaaggcccgcccgcagcagcgggcaggccagcgtaatcacagcgcaaccggggctaggcgttccaccgttcgatgacgttatctcccttatagacgctaagcaccgagtagtgcgccgtatccaaacgcagcaaccgcgcgaaatgcgggtccacgcccagccattgcgaggtgaggatgcgcaggatgtgcgcatgagccaccaacagcacattatggccgtctttcagcagcggcgtaatctcgtcgatggcgctcttggcgcgtgccgccgcttcttccagcgtctcgccaggcccggcatggaccggcacctgttcgcccgaaggcaaggtctcgacccagtcgccctccagcgtgggcgtcagcgagcgcggcccgtcacgccacacatcccattcaaaaccgctggcctcactcacctgctggcgcgtacgcccctcggctcggccgtaatcccattcagcgatgccgtccaacacaccgtggtccgcaaaaccggccagttcagcggtttggcacgcccgcttcagcggactggaaaacacacagccctggctgaatccttcggggaaagcttcgcgcaggcgccttccggcatccgctgcctgctgctcgccgaccgcggtcaacgggatgttcgtgcgcccggtatgctgcccggattcgctccacacggtctggccgtggcgcagcaacaccaaaaatccgttgccgccacgagagttctcgacggcaacggtgccgttcacgttctgttcgctcatgcctccactctagtctgcgctcgttcatgactccaccattaacgcccatcttttgcgctgagatgattgagatgctattagactgagagtcatgagcgacgaaacgaacaccgacttcccctccagcgccgaccgtgcggtcgacagcctgcaccgcatcgacgagaaggtcaacaggctgcgcgaggaccggctcaacgaccctgattctctgggcgacaagctcatcaagtcggcagtcccagcgctggcaggcttggttgccggcaaagcattccagatgatatgggacaagggcacgagcaaacgcaatctgcgcaagggactggcggcagacgcgccgcaaggtctggcaatgagtctggcattcgccgccgtttcggccgcactcggcgcagtggtttcgcagctgtcggatcggggctccaaggcgttcgtcgaccaccgccatcgcaagtccagccgctaatcccccggttggatgatggtttctgttggttgactgatggctcatcgctggattttcgtcaaggaaccatcagtcaatcgacaggaaccatcagtccagcacagttccgccacacaatatcggcatttcactgtgaggtaatccaccgtggcgtccggcgtctgccgtgcggcaataaaaccatggttaccaacgcaacaatcgaggctcttctgggccgccgctccatccgtaagttcaaggacgaggccatcgacgacgatacccgcgccacgctcgaaaccgtcgcccagcatgccgcgtccagccagttccttaacgactggtccgccatccgtatcatcgacccggccatcaaagccaagctcgccgaattcggccatcagccgtatatcgccactgcgccgttgctgtacgtgttcgttatcgacgagcaccgcaacgcgcgcatcgccgaacgcaagggcatcgatcccgcttccgacgaattccatctgaagtacagctatcgcttcacccaagctcagaacgacgcagtgctggccctgcacgccatggagaccgccgcctattcgctgggactgggctgcgtgattctcggctctctgctcaacaacatccccggccttatcgacgtgctgaatctgccggaatacacgtatccggtgctgggtctggccatcggcaagcccgatcagaacccgaccgtcaagccgcgcatgccgcgcacgatgcagttcttcgagaacacctacccggctgacgccgatggcgtactcgaccagctgcccgccttcgacgaggaagttcaccggtactacgatctgcgccaagccgaccgtccggtggacgctttcagcgatcaggtcgccacgatcagtcggcaggatgtcagccatcagacactgctcgacaaggccgccgctcagggcttccgtctggatcagtgagaccaggaccaacgaaataggctcggatgggctcgtcactgagtcgtctcggtctcagcactgcgacgactcagttccaacacctcaacatttcatcaccggataccggcaaaattgcacaaccatcccgccggtgtcgcaccatcaataaacgttcacatatcagtcccattatgcggacaaccaacggccagttttgcaagaaaacccgccaaaccagcagtattcgcaccagtggtgggaatagactgcatgtggccgcagtgactacgaaccggaaaagagggactggatgcggacggtttggcaagtctttctacgcgattgcagacgtatcttacgcaatcccgttgccgttgtggtgacgctcggcgtagcaatgctgccctcgctgtacgcatggttcaacattctcgccaactgggatccctattcagccaccggcaatctgcaagtggccgtagccaatgaagaccaaggcaccaccaacgatctggtcggccatctcgatgcgggccggcaggtcgttaagaaactcaagcagaacgacgaactcggctggcgcttcgtagacaatgaggaacaggccgtacacggcgtggagaccggcgaatactatgcagccatcgtgctgcccaaggatttcagcaccagcctggtcgaatcggtgaccggaacctccaaacagccgaaaatcaagtattacgtcaacgagaagaagaacgcgatcgcgccgaaaatcaccgacaccggtgccaccaccatcgacgagcagatcaactccgccttcgtcaccacggtagccaccaccgttgcctcggccgtttccgaagcgggaggcgatctcgaccaagccaccggcaaagtccagcacgatacgatcaatgatctcaatacggtgatgtccacgctgaacaccgttcaggattcactcaccgacttacagaacacgctggcccaatcagacacgattctcgccgacgccaaacagaccaccgcctcactcaagcagaccgtcgcggccgcgcagaaggcctcccgccagtccggcacactgttggcggagacacaggccgggtcacaagccttctccaccacactggtcggcgcgctcgacaccagttcagcacaactctccggactggccgttcacgtcaacaacgccgccggcagcatcaccggctccttcaacagcgcacagaactccgtcgacaccatcaccaacacactttcggccccactgaatgccacccaaacgtcaatcagcgatctgaaagacgcgctgaccaaagccggcatcggcaaagacaccaccgacccggtcggccagaacatctggaaacaaatcgatgcgctcgactcattgatcagcaaacagcagacacagctcaacaccttccataccgacaccacacagttcatcaactccggtaaagacgccaccacgaatctttccggagccatgaccaacaccaccaccggcggcatcgcggcgctgaataccgcgcgcggctcgctgaccggcaccgtaatgccgtcgctcacctcatcattgaacagtttcgccgccctgaatggcacactggatggcacgttgacttcgttatccggcaccttggatcaggccgacggactgttcgaccagcttgtcgataccctgaaccaaacaaaaaccaccatcagcagcacgcaggattcgctgcgccaggtggccaacgatgtcgccaccgtacgcaccgatatcgccacgctcgatagttccgccgcttaccagaaaatccgggatacgctgcatctggatgacaagggattcggcgacttcatgggcaatcccgtcaccctgaccacgaaagtcgtgtatgccaccgacaattacgggtccgcagtcaccccgttctacacgaatctggcactgtgggtaggcggtttcgtgctaatcgccatctacaagcttgaggtcgaccgcgagggcattcgccgtatcaccgctacgcaagcatatcttggccgctggctgctgctggtcaccatcggattcctgcaagccgtcatcgccaccatcggcgatctggtgcttggcatccaatgcgagcatccgctgctgttcatcttggccggaatcttctgttcgttcgtatacatcaacattatttacgcactggccgtggcgttccgccatatcggcaaagccatcgccgtaattctggtcattgtgcagatacccggcgcctccggcctgtatccgattgaaatgatgccgaacttcttccgcgaactgcacccgtggctgccctttacctacggcatcaacgcgatgcgcggcccgattgccggcctgtacgcgaaccattactggctcgacatgctgcacctgttctggtatctgccggcggcactcttcgtgggacttgtcatacgccggtatgcgatgaacctgaacgcgctgttcgaccgtcgtttgggagataccgacctgatgatcaccgagcacaacagcatggtgaacgaacaggtgagcttgaactccgtattccgcacggtgtccgacagcaaggaactgcgcgatatcatcgcccatcgcgcgcaccggttcttcgcacggtatccaaagatgatcgttgccggtctggcattgctgaccgtactcccgttcgtattcctggtgctgctgttcgtcacccaagagaaaatcgccatgctgacctcttggattctgtcgattattcttatcgacgcctatctcattgtggttgaatacgcacgcgaagcctacgccatgcagcttggcgtcagcgccatgagtgccgacgagttccgcaatgtgatgctcaacggatatgtgtggcggcgtttccacggccacggacgtcacgaagcggcgatggacagcaatccgaatatcggcgaaaccactgaacgactcgcaccgttcagtgatcaggtcaccgagccgactgcgcacaccgcacagtccggtcagtccgggcagcctgggcagggaggcgcacgatgaagcttatctggaaaatattcgtacgtgacgtgcgccaagccacccgcaatgtgatcgccgtaatcgtggctatgggattggcgattgtgccggcactgtacgcctggtacaacatcgccgccagctgggacccgtacggcaacaccaaggccttgaaggtcgctgtggcgaacgtggataagggctataagtccgatctgatgccgatcaccatcaacgtcggcgaaaccgtgaccaatacgctcagggccaatcatgaccttgactggcagtttgtggatcgtgctaaggccatcgatggcgtgaactcaggcgaatactatgccgcgctgattattccaaagagcttcagctccgatatgatgacgctgttttcaccgaagatcaagcacgccaagctcgaatactatctcaatgagaaaatcaatccgatcgctccgcatatcaccgaccagggtgctaccaccgtggccacgaccatcgaccagacattcgtgaagaccttggcgagcgtggcgctggatttggtttccaacgtggccgattacgcgcaaagcccgcaaatggagcagtacgtcaacaacgccaccagtcatattgccaccatgtcgtctcgtttgaccggcactgcgtcgcagatggattcctatgccaatctgctcggggccgccaacagcatcattgattccaccgataagctgctggggtcaacaggctcagctgcggccacaaccaaaaaggcgttgaaacagacccgcaacggcgtctccagcctcgacaaggcattgtccggagccaccgatggcgtcggtacggcattgcagcaggccggttcatcctacgacaccattgccaagcaaatcgatgccgcttttgccgatgtgggctcacaatcctcacagatatcaaacaagctaaccgatatgcaattcaaagtggaggctcaggctgacagctttggaaagtatgccgccgctttacgagatctcgccaaacaagcggcttcactgcccgtgggcggagataccgttgccgctcaactgaacgcggctgcagaccaagccacaaaggcgcagcagagcatgcagcaagccgccaccgcgttgggcgatgcggccacgcacatagcaaacggtactgccgatgccgatacagcgcgtcgagatctgaaatcacaaatcgctgccgccaaacaatcgattactcaggcttcagacacgtacaagagcacgctgaaaccgcaactgaacaatctgacctcgtccatggacgaagtggccacgcaggcaagttccgtaatcgacgggcttgcatcgaccgtaagcagcgtgtcaggcctttctggcggcgtttcagacagcctgacggacatccagtcggccttgactgacgcagctagcgctttgacccgttcggcgaagaaactcgacaacttgtcttcccaactcgcctctatcaccaatggcggcaccatcgacctgtctgtgatttcctctgcgaagcccgatgccattgcttccatgctggcggcacccgtagcggtcgaccgcatcgcgctctatcccgttgccaactatggttccgcgatggctccgttctacacgattttgtctatttgggtcggtgcgatcattctggtcgccatgttgaaagtatcgatttccgaccatgagaaggctcgtatcttagggttgggcaatgatctgccgctcggttcgggagtgggtcttcgcgaggccatgattgccgggcggattgccggaccggccgccgcgttggatgtgctgaagaagccgcgtgccgagtcttccggcaatgcgcggcagttcggtttacgcttgcaccacgaatatttcggccgatacatgattttcggtttccttgctttgctgcaaggtacgctggtgtgcctgggcgatatgttctatctcggcgtgcagtgtgagcatccgattcagttcttgatggtcgggtggttgtctgcactggtgttctcgaatattgtgtatacgctggccctatcgttcggtgatatcggcaaagccattgccgtagtactgctggttatgcaggtagccggttccggcggcacattccccattgaaacactgccgacgttcttccaggtcgtttctaaatggctactgttcccctatgcggtggatgcgatgcattcggccatggccggctcgttcggcatggaatactgggtttccatgggcaaactggcactgttccttgttccctcattgctgttgggacttatgttgcgcaagccggtaattcgcttcaacgattgggttatccgcaaccttgaaaacaccaaggtgatgtgagtgttggacgaagtgtgtccgagcgccctgaacgcttagcagcctacgacctgacgtgtttggaccgtaacctgtctcagacacggcgttggcgaggcctgtggagcttctgacgctaacgtctacgtggcttgtagccctttttacgactgtgtggcttgagttgctggttcagcggtacatgccggtaactggattgcggatcgcgatgcgtgagatgccagcatccgcaaaattcgcaacggtacacccatagctcaactccgcgctcgattaggctttgatcagcggcacgctgaacctgcgccttatcgtgatacatgattttattcgacgtagcgcaacgtttaggggtgaagtaatgcatagcagaagccagtgtagagcgaccccataaccaagccagtttctggctcccctcaggggggggccgtccgcacagcagaccgggggggaggaggcccgggcgtcgggattccacggtcacggacgtgctgttttccggatttcctgcggaaatgggaacgcgccgcgccgtctctcttcggccccgacggcagggccggccgggaatggtcccggacgtgggtctcatgagtgcgagaagccccgggtgtttttgtgggggtgtgtgggtttgggtcgtgagtgtttcgggtatgcgaaagccccttggggcgtgtgctccaaggggcttcctgtacgtgtggtgcggcggcgtgctactctcccacaccctgtcgggtgcagtaccatcgccgtgccaggccttagcttccgggttcggaatgggaccgggcgtctcacctgggccatggccgccgcaaatcttctcttgtacggtcagacgctggggtctgccggcctgtggcggcctgggaaccggacagcggacgcggatgtgtcgatgtttcgtcttgtggccagacaatgctcattgccgtctggtgccgtttgcaggaggaagatgcggtccaaccgccaggggttggaatgttagtgttgcctttcgtccgttagtaccggtcggctccacccctcgcggggcttccacgtccggcctatcgaccacgtgttctgcatggggactacaggaactcgaaggttccacggaatgcttatcttggagcaggcttcccgcttagatgctttcagcggttatcccttccgaacgtagccaaccggccgtgccactggcgtgacaaccggcataccagaggttcgtccacccaggtcctctcgtactatgggcaggcctcctcagcattccaacgagcgcagaggatagagaccaaactgtctcacgacgttctgaacccagctcgcgtgccgctttaatcggcgaacagccgaacccttgggacctgctccagccccaggatgcgacgagccgacatcgaggtgccaaaccatcccgtcgatatggactcttgggaatgatcagcctgttatccccggggtaccttttatccgttgagcgatgccgcgtccgtacaccggcaccggatcactagtcccgactttcgtccctgctcggaccgtcgtcctcgcagtcaagcccgcttgtgcacttgcactcgccacccgattgccaaccgggctgagcggacctttgggcgcctccgttactctttgggaggcaaccgccccagttaaactacccgccaggcactgtccctgaacaggatgactgttcgaggttagacatccaatgcgaacagagcggtatttcaccttacggctccgcgcgatctggcgaccgcgcctctcggcctcccgcctatgctacacaatccacaccgaatgccaataccaaggtatagtaaaggtcccggggtcttttcgtccttctgcgcttaacgagcatctttactcgtactgcaatttcgccgagctcctggtcgagacagtggggaagtcgttacgccattcgtgcaggtcggaacttacccgacaaggaatttcgctaccttaggatggttatagttaccaccgccgtttaccggggcttgaattcaccgcttcacccgaaggctgacggatcctcttaaccttccggcaccgggcaggcgtcagtgcatatacagcggcttgcgccttcgcatgcacctgtgtttttggtaaacagtcgctaccccctggtctgtgccacccccaaaagctcccacagcaagtgtgttcaccatcgggggtctcccttaaaccgaaggaacgggagtgatttgccgagttccttgaccaggattcgctcgatcgctttggtattctctacctgaccaccagtgtcggtttggggtacgggcggcttcgagcctgacgccgaagcttttctcggcagccgggatcaccggatatcgggccataaggcccccatcatcgcacctcggacccatgcgggacggatttgcctgtcccacgccctgcgtgcttgaccacggaagaccacctccgcggccggctacccttctgcgtcactcctgcgctgacctactacaaggatcggtcccaacaggccagggcatcccgcccccgaaggagcagtaagcccggacccggaggttagtactccaagcctcggttttggcggctgaaagccggtacgggaatatcgacccgttcatccattcgactacgcctgtcggcctcgccttaggacccgactcacccagggacgatgaacgtggccctggaacccttggtcatccagcggacgggatcttcacccgtctctcgctactcatgtctgcattctcactcccatgaagtccacggcgcgttcacacggccgcttcgcccctcatgggacgctctcctacccagtacaaaatactgccgcgtcttcggtggtgtgcttgagccccgctacattgtcggcgcggaaccactagaccagtgagctgttacgcactctttcaagggtggctgcttctgagccaacctcctggctgtctatgcgactccacatcctttcccacttagcacacgcttcgggaccttagacgacggtctgggctgtttccctttcgacgacgaagcttatcccccgccgactcactgccgggatacgcgtcaccggtattcggagtttggttgctgttggtacccgatacgggcccgcaagcatccagtagctctacccccgggacgtaatgacccgacgctgcacccaaatgcatttcggagagaaccagctatcacggaatttgattggcctttcacccctagccccaagtcatccccccggttttcaacccaggtgggttcggtcctccacgcggtcttacccgcgcttcaacctgctcagggctagatcatcccgcttcgggtccaggacacgcgactcaaacgccttttaagactcgccttcgctacgcataccccacacgggttatgctcgccacatgccactgactcgcagactcatttttcgataggcacgccgtcaccccacaaaagggctccgacggattgtaggcgcacggtttcagagactgtttcactcccctcccggggtacttttcacctttccctcacggtactcgttcgctatcggtcagacaggaatattcaggcttacccaacggtctgggcggattcgcacggggttccacgggacccgtgctacttgggagacgcgatcggcagaccatgcgcgttcaggtacggggccctcaccctctgcggcccggtattcaacccggttcccctgacacatggttttctgcaactgccggccggcccgtcggagccggcgcacgcgatcccgcaacaccccgcgcgcaacccccgacgggtatcacacgcgcaaggtttggccatcatccgctttcgctcgccactactcacggaatatcctttcctgcaggtactgagatgtttcacttccctgcgtaccccccggccgaagccggtaccgacccatgacggtcggtgggttcccccattcggaaatcctcggatcaaagccctgttggcggctccccgaggcatatcgcagcctcaaacgtccttcatcggtcctgtctgccaaggcatccaccatacgcccttgcaagcaacacacaccacgaaagtgcatggccgcaagattcctctagcaaattcccagacgacaaatcatcacactaaaaatgatcacaaaacgatcgaaacgaacaatagagttcgattcgaaatcaacagcaaaacaaagattcaaaaaccattgttttgctcgcgtccactatccagttctcaagccaccacgcaccgccacgccatcgcgccggcacacggccggcccccaggcacgacgggcatcgaatcgcgccaggcaaaaagcctggggtggcgatccgggagcccaaaagcgcatccataccaccccgcacccaccgcacgaccggcggggcaaagccaacgacgtcttccacaccagcaaccccgccgccatcgcaccatgcgacgcgcggggcgcacaccgtcggacgaacatccgactgcattctccgtagaaaggaggtgatccagccgcaccttccggtacggctaccttgttacgacttagtcccaatcacgagcctcaccttagacggctccatcccacaaggggttaggccaccggcttcgggtgctgcccactttcatgacttgacgggcggtgtgtacaaggcccgggaacgcattcaccgcgacgttgctgattcgcgattactagcgactccgccttcacgcagtcgagttgcagactgcgatccgaactgagaccggttttcagggatccgctccgcgtcgccgcgtcgcatcccgttgtaccggccattgtagcatgcgtgaagccctggacgtaaggggcatgatgatctgacgtcatccccaccttcctccgagttaaccccggcggtcccccgtgagttcccggcacaatccgctggcaacacggggcgagggttgcgctcgttgcgggacttaacccaacatctcacgacacgagctgacgacgaccatgcaccacctgtgaacccgccccgaagggaagccgcatctctacgaccgtcgggaacatgtcaagcccaggtaaggttcttcgcgttgcatcgaattaatccgcatgctccgccgcttgtgcgggcccccgtcaatttctttgagttttagccttgcggccgtactccccaggcgggatgcttaacgcgttagctccgacacggaacccgtggaacgggccccacatccagcatccaccgtttacggcgtggactaccagggtatctaatcctgttcgctccccacgctttcgctcctcagcgtcagtaacggcccagagacctgccttcgccattggtgttcttcccgatatctacacattccaccgttacaccgggaattccagtctcccctaccgcactcaagcccgcccgtacccggcgcggatccaccgttaagcgatggactttcacaccggacgcgacgaaccgcctacgagccctttacgcccaataattccggataacgcttgcaccctacgtattaccgcggctgctggcacgtagttagccggtgcttattcaacgggtaaactcactctcgcttgctccccgataaaagaggtttacaacccgaaggcctccatccctcacgcggcgtcgctgcatcaggcttgcgcccattgtgcaatattccccactgctgcctcccgtaggagtctgggccgtatctcagtcccaatgtggccggtcgccctctcaggccggctacccgtcgaagccacggtgggccgttaccccgccgtcaagctgataggacgcgaccccatcccataccgcgaaagctttcccagaagaccatgcgatcaactggagcatccggcattaccacccgtttccaggagctattccggtgtatggggcaggtcggtcacgcattactcacccgttcgccactctcaccaccaagcaaagcccggtggatcccgttcgacttgcatgtgttaagcacgccgccagcgttcatcctgagccagaatcgaaccctccacaaaaaacctcatgaaaagcatccgaatagatgactctcaaaacaaaaattgacgagcacgtccttaaggaaggacgccctcaaaaaacctcacccctcatcaaaccctcccgggtacccaaccaccacgacaggcaatcaggcgaggaatgaactggcaatcattgactataaagaagtagtacaaacacgctcttgagttctcaaaccaccaccacaccagcaagacaggaaaccaaccagaagaaggaacccgccgcgctgagcggcaacaggtgaataacttacacgcatgtccggattcacgcaaatcaaggcgcacaaaaaccccaggaatcggcataacagcgcggttccctcggcgtgtcgcacagagcccactttgctctgatgaggctaggttaacccctcaaatgtttctgaaaagcatcaaatccactattcggctggcgtgtcgcgagagttttcagcttgtcggccctgcgttcatctctcggcaaccacactgccggcgcacaatcggcgcatgacagcgctccgtcatcggatttcgttcatgaatcgcgggtatacctgtagttatgaccaagaagattgctgtattaaccggggcgggcatttccacgtccgccggcatccctgatttccgcggtccggacggtgtgtggaccaagcatcctgaccaaatgagcgtttacgacatcgatctgtttctgcgcaacaaagaggaccgcgagtactcctggcgctggcaaaaggaatcgccagtatggaatgcgcagcccggcactgcgcataaggcgctggtcaagctggaacaagccggcatgctgacgctgctggccacgcagaacttcgatgcgctgcatgagaaggccggcaacagcgacaacgtcatcgtgaacctgcacggcactatcggcacctcgcattgcatgaagtgccatcaggaatatgccacggcggacatcatggcccgtttggatgaagagcccgacccacattgccatcgcaaactgaagtatcgtggcgatatgccgtgcaatggcattatcaaaaccgatgtggtgtatttcggtgaggcgttgccggacggcgcgatggagaagtcgtacagtctggccaccaaagccgacgaactatgggtaatcggatcgacccttgaggtgtacccggcggcgagcattgtgccggtggccgcgcaggcgggcgtgcccatcaccattatgaatatgggtcacacgcaatatgaccatcttgcgagccgcttgattcatgaggatatcgccgttgccctgccgaagttggtggacgagacgattgcggagaacaagtagccctcagcataacgaaagcgccggtgggtgggttaagcaactgatgattgtcggttaaccacccaccggcgcttttgcgccacctcccgccagcggtattggaatcagtagatgcgcttgggctggaatccggcttccctgagtgccgcgaggatgcggtcgatgtgctcggggccgttggtctcgaccgtgacgccgagagacaccgcgttggtgtagtggccggatgccttgaactggtcgtgatcaagctgaatgacgttggcgcgctgctcggcaagcagggtggccaccttgacgagctggcccggagtatccggcagctcgacctcgaagttcatgatgcggccgcgggcgatcatacctttctgaatcaccgcacccatggtcacggtgtcgatattgccgccggacataatcggaaccaccacgtgcgggccggtggcggcggcgaacttgcgcgaacgcaggttcaggtgttccagcgcagccagcgaaacggcgccggccgcctcgaccaccagcttatgcttctcgagcatgagcagaatcatttcgttgatgtcgcgctcggtgacggtgaccagatcgtccaggaactcgttaatcagagcgaagggcaggtcgccggggtgcttgaccgcaacaccttcggcggaggtaaccacatggtcagccggagacacacgacccgcggccagcgagtccttccaggccggtgagccctccggaatcgcaccgattacgcgcacttcaggcttgaacgtcttgatggcgagcgccacgccggcacccaggccaccaccaccgagcggcacgaccacgtcagtgacgttcggcacgtcttcgaggatctccagaccgatggtgccttggccgcagatgacttcgtaatcgtcgaatggcggcacgtaaatcatgccttccttgtcggcgagctcagcagcgtgggcggcggattcgtcgaacacatcgccgtacagcaccacatcggcgccgtaggccttggtggcatcgaccttcagcggcggggtgatctgcggcatgcagatggtggccttcgcaccacgctcacgggccgcataggccacgccctgggcatggttgcctgcggatgcggtgacgatgccacgggcgatctgctcttcggtgagcgatgcgatcttgttgtacgcgccgcgaatcttgaaggaaccggtgacctgcaggttttccggcttcaggagaatctcatgaccggtcatctcgctcaataccggcgaagggataatttccgtatgacgggcagtccctttgagacgtttggcggccagcttcagttcggctgcatgatcacgctgcagcgccttcaaaacatccttttgttccatagctttccattgtaagcaccacaatgccgagagacaccggctatctcgcttcacagaggtacattcggccttttgcagacagctatctgttttcataggggtaccgagaagcaaaaaccccgggtataagccttgattttcaatgcttatacctggggtttcgacgttacggtacctctctcaagacagatagcatttcgggatagccccgaagtacctctttgagcggagaaaggcactcaatgcactacaactggatgacggctgcctcccacgggtcgagctcgcggttggcaagggaggccacggtgtgcggagcgtcatacgtgctgatcaccacattcggctcggcgattccgacggcggttagttcggcagcctcacgtggcaggtcaacggttcgactggacatattgactacgaccaacaacttctcagcgtcgagctcacgggtaaaggcatagacgtgcggatcagcggcgtcaatcagtcgccagtcgccggcggccacgaccgggctgttgtgacgcagcgcaacgagttgcttgtagaaggagtacaccgaatccggatcatcgaattcaccggcggcgttgatctcggcatgattcggattcacggaaatccatggctcagtggcggcgtccggagcggtgaaaccggcgtagccggaaccgtcccattgcatcggagtacgcgcgttgtcacggctgcgcgcggccagaccggccatcattgactcagacgactgcaccttggcctcctcgaccctctgccggtaggcattcaaggattcaaggtcacggtactggtcgagacgcgtgaagtgggcgtcggtcatgcccagttcctcaccctgatagatgtacggggtgccgcggtgcatgtgcagcatcaggccaagtgccttggccgaacggacgcgggattcctccgcggagtcgtcgccccagcgggagaccacgcgcggctgatcatgattgccggtgaacaagctggcccatcctgcgttctgcacggcagtctggtaaccggccataatgctcttgaatttcggcaggtcaagcggcagcggcttccacttggtaccttcgcaatcaaaatcaacatgctcgaacaggaagagcatgtccaattcaccgttgcccggatcagtgatgtgctcgttacgctgagccgtgacgcctggcgcctcgcccacagtcaggaagccttcacgcccctcgaatacctcacgtcgcatttcagccaggaattcatcctgacgggggccgtccgcacagaacggattcgggttggaatagccctcctcgcccacaggaagatcctcaagctccgagccgtactcgcccggcagcttgccgttcgaatcggtgcgcttggagatcagggtgatgacgtccatgcggaagccgtcgacgcctcggtcaagccaccagttcatcatgtcgtacacagcgcggcgcacggcagggttctcccagttgaggtccggctgcttcttcgagaactgatgcaggaagtattcgccacgctcggggcagtattcccatgcggagccgccaaagtaggagccccactgattgggctcggcgccgggctcgccgggcgtggtgccgggacgagccggacgccaccaataccagtcggcgtgttcgtcgtctttgttcttggatgcttcaaaccaggcgtgttcatcggaagtgtgattgacaacaagatccatcacgatcttgagcccacgcttgtgggcctcggccagcagctcgtccatatcgtcgagcgtgccgaacagaggatcaatgtcctgatagtcggaaatgtcatagccgttgtcgtcttgcggagacttatagaccggggatagccacagcacatccacgccaagatcagctaagtaatcaagacgcgacgtgatgcccttaagatcgccgaatccatcgccgttcgtgtcttggaaagagcgcgggtaaatctgatagaccaccgcgttggaccaccacggattgggggtggcgccgttggtgcggatggcgtcggggattattgcgcggttgaaagtagtcatcattggctccttattgatatctatattgctcgttgctcacagtctaaaaattggcgaattacattcccattggagaactgcgttggtgtgccggaaaataaatatcaatcggcatatgcgctttcatgattgcacccggaaaacacgcagtcggccgtactcgatctcgcaagtatgggtttctcccggattcatatcaatcgtcgcaccatggtcatcgatgatgcggcaagagcgaccgctagccgtaataatgccgatttgtggctgccggcgcaatccgacgaaagcgatgacctgttctgcgccgaatcttgctgtgacaccgagcgcatagtccgtatgttcggggtcattgagcagtgacgcaatgactggtcgggccggctcatcaggacgcggtaatgtaccatcttcggcaagtaaatcacgcaagacagccgcatcagtgtgaccgcaggcatcggaacaatacactggtccgccgctaagcaatcggagcacggcatggactcgcgcatggggatgctccgtccagaacatgtcccaatcacagtggtacagctcccccatcagcagtgcacagtatgcgttctggataaggtgttcgcccagcgaatcaggattgtgcggtagatagtcgtcgctactacgggtgattggcgatgaaggacgatgccaataatcctccggtgccatgcccatgcagttaatcaatgcgccgccgaatcgtcgtgaggtcacttcatcaagcgcctgatggcgtccccaggtggcttcaccgtaactttcggtgccacgaaccattactgacgtggaactttgcgaatccactttgacgaaatcgacgccggcttcggcgagttcgccgtcccaggcatcccagaactgtgcgggttgttcagcacgacttccaggaatcaggcaaccattcgccgtggtggttattgcggtcgggcagctggccgcggctacacccgattcgtccaaaccattccaatagccttggaacgcctgccacacgcctacgctgcgcacgccatagtgcgttttgagcagcgcaatggtgtgggcaagcccgtgggggaaacgttggcgatccgcgccaaagtcgatcagggtttcctttgtgcgatccgtgttggaccaaccgtcatcgataagcacccaggaaatgggcacatgcttggcttggaactcctccatcttgttgacgatagcctgctcgttgacatctcgccccaatgaatcccaagtacaccatcccaacccggtgagcgcatccgggaatggacgctccttacgggtacgaatacccagctggcgtgctgccgtttgtgtggcagctcgaatggccatatacgggtcggatgcgcaagcgatatatgcggcagtgtcacatagagtcgtgcgaccaacccggttggaagacagcacgagccgcaaagccgtgtcatcagattctgttgcgggctgcccactgaaatcagcccgaatatccgtgccgcagatagcgaccaacactagccactcggcatcttcggcatcgttgttgcggcgtaacaataactgcgtgcgttcaggcagttcagatggtgtacgcacccaggtcgggcgcatccaccactccttgtgctggtatagcgccagcatggtgtcatcgttgccgctgtcgacgccggccatggtgagcgacacgtcaatcgcatggtggggctcaaacgcttgttgttcctgaaaggcagcggcgcggtccttgggctggggtgcatgcgcgttcacatcgatacgccagagtcgcacctgagcatcaccctggatacccgcactggacgtgcactcatcttcgcatgattcgggaacgattgtgacggcttctaccggcagttcacagattgccgaagcctgttcgccatagacggcacgaccggtatcaagatgggccgttaccgtgcgaacggttattggacaggtttcggcaatcattggcgtaactccttggtgttcttcaatgagattatgctggcaaggcccagacggtagcagctggaggaacgctctcgacctgagtgttcgcctgcacagtcgcgtcagacacaagtagcacggtcatcggctgcggcaaggcgactggttgactgtcagagaagttcgccatcacaaccatgccggacggcaagcgccaaccaagcagcggcgccggacactcttcgttggtaagccacgagaactggaagtccgtgccgttggccacccactgtttgcgcaatgcgacagcagcacaatacaggtgcaggacggaagccccgtcaccaatctgacgattagtggcatactgcgcaaaccatgccggctggggcagccacgaagcaccggtggcattgaagccgaacgccgggccgtctgactgccacggcagcggtacgcggcaaccgtcgcgccccttgaaataatgaccggaacgttcccaattgggatcctgaatttcatcttcggtcaaatcaaagtcctccggcaaaccaagctcttcaccctgatacacaaaggcggtacctggcaggccgagcatcaccagcgctgctgcacgggcacgacgagcggcgagcgcggggtcaatcggcggattcgtgccgttggacgtcacccactgctcgatgtttgcaccgctcggcagtccgagacgcgaggcgatacgtggcacatcgtggttgccgagcacccaggtgggggcggtttcggcagcgagagcatagcgatgcgtgcgctcaatcgtggtgcggtattcttcgcgattccaggcggcctttgacatggagaagtcgaatacggcaccaagttcatcaggcttggcgtattggaaaatacgggtggtgaatggcgaccacgattcgccgaccgcatacttggctggcgtgtactgattgaacaggtcgcgccattcacggtagatatcatgcacggcgtcgcggtcccagagcggatcggagccatcggtagcctgtggagacatcagtgtcgggtcgatacggtcgcgcagcggctcacgcaggtctttggccagaccgtgcgagacatcgatgcggaaaccgtccacaccgcgatcgcaccagaatgtgagtacacgcaggaactcatgccgcacctcgggattgtcccaattgaggtccggctgctccttggcgaacagatgcaggtagtaccagccgtctccacacgactcccatgcggaaccgccgaagttactcagccagttggtaggcggcaattcgccgtgctcccccttgccctgccggaacacataccgttgtgccgcttccgattccggaccttgagccagggcctcttggaaccaacggtgctgatcggacgtgtggttcggcacgatgtccacgatgatgccgataccgcgttcgtgcgctttggccactaattcgtcgaactgatcgagtgtgccaaggcggggatccacatcacaatagtcggcaacatcataacctccatccgccagcggcgatggatagaatggagaaagccagagcgcgtccaccccgagcgcctgcagatagtcgagacgatcgatcacgccttggagatcaccgttgccgtctccattggcatcgctgaatgagcgggggtaaatctggtagatgacggcgtcgcgccaccagtcattgttggtgaaagtcatatcgttcccctgtccgattgctcggtacgtatggttttaccagtatggccgcacgaaacactgttccggcggccataccctacatcctcttgccttcggatcagcccttaaccgagccggcaagcatggcgcggatgaagtagcgctggaggaagatgaacaggatcatcgtcggtgccatgatgagcagtgcgcccgcgttgagcagcaccacgtcggtctgatactggccaacgaacgactgtagggcacctgccatcgtgcgcttgttcgggtcgttctccaacaccacagccaacaggaactggttccaggtggccaggaaggtcagaataccgagcgaggagatggctggcagtgccaacggcagctgaatggaacggaacgtgcgcagatggcctgcaccatcgatggatgcggcttcgatcagatcacgcggcatctgctcgaagcaggagcgcatccacacaataccgaacggaatattcaggccgatgagcggcaggatcagggcaagacgggtattcagcaagcccatgccactgatctcgtagtacagcggagtgaccaaggtttcgaacggaatggtcagaccgacgaggaacagcacgtagatcaggcccttgcacggcaccttgagctgagcgaaggcataaccgccgagcgagcagaagatcaccacgcagggcacgaccacgatcaccagaatgcagctgttgagcagcagcggggtgatgtttgccatgttccaggcgtcgatgaagttctcccagtgcgggtgggcagtgaactggataccttcgggcatggaaccttgcggctgcaatgccgcggagagcatgctcaggaacggcagtacgcagaagaggacggtcagagcgagcatcgccgtgccggtgatgcgaacggctttggattgctgcatggtcactgctcctttccgttgaccagacgctgcagaggtccgacgaccagcagcacgagaatcatcagggtgacggcgagcgcggaggccaagccaacgctctgctgggtgaaggccaagcggtagacctgcacgccgggcaccatggtggaggtgccggggccgccctgagtggacatgtacaccacgtcgaagctggcgagcgcggagatgatggtcatggtcaggcatacgccgatttggccgcgcagaccgggcaacgtgatggagaagagctgacgccaccagccggcaccgtcaagacttgctgcctcgtacagggactggtcgatgccgccgatgcccgagagcaagagcaccacacagaagccgagctgcagccagaaaccaatcacgcctaccgcgttcagggaggtggattggtcgccgagccacacgtgggcgaagtcgccgaggcctactgcgcgcagcagctgattggcggtgcccttgtcggccagcatccaggtccaggccacaccggctgcagcgcctgggataacgcgcggcaggaacaggcaaacctgcgcgaaggaacgaccgaccttggacttcatgtctttgatgagcacggcaatgatcaggccgagcacaatcgggatgatggagaagaagatgatcaggtagaaggagtgcagaatcgatccgtacagatcggggtcggtgaacacggtgatgtagttttcgacaccgatgaaggtgctagcatcgataccgttccactcgtagaacgagtaccagatggtctgaatgatcggccacaactcgaaggcgatgtagaacacaagcgccggagcgaggaaaagcaggctgaccagaccgagggacatattgcgcttgggcttgaccgccttggctgccttatgggaatccatgattgtcaccacgctttgctggtttggtgtgaactgggaatcgaacatcgcacacaacgtcgtgcgcgcgatgggaaggaaccaggcggagcgggaaaaagggaagaacactccgcccggtaagtgcaagggttacttgacctccttctcgtactgagcctgaatggattcgacgaatgccttgggggtcatcgtgccgtcaatcagggactggaagccggggataatggcgctggcctgcatacctgcggtggcgttgttgatgtagtcggtggtgttaccggtcttcaccagaccttcgtaggcggtaaggacctggccgagaagctggttatcggtgctcggagtctcgccttcgccgaccggcgggtagccgttgtcaactgcgatctggcgggcttcgtcggactggaggaagtcgaggaaggcggctgcagcgttcttgttcttggcgttggccgggataccgaaagcggtcacggcgttggctgcggcagaaccggaatcggccttttcgccggggaaggcgatccagccggcgtcatcgccaagtgcatcgttgatggaggcggagtaccagctgccggaggggaagaacagggcttcgccgttgcagaagcggctcagtgcagtggaaccgtcaagggcgagcgcgtcggaggagaagtaaccggcatcctgccagtccttgatcttctgtgcagccttcacggcaccgtcggtgttgaaggtggcgccatccttctggataatccaatcctgcacggtatcgcgaccctcatagttggtgagcaatgcctggtagatgtaggaagtgccgccttccttggccggcatcatcatggcgagcttgccagcgtcggaggccttcttcatatcggcctcgagctcttcgacagtggccggagcctcggtgatgccgagttccttggcgactttcttgttccagtacaggccggtcatcgagacaccgtccggcactgcgtagaggctgccggaaccgatcttaccgtcggagcccacgcggtagacctgagtctgggaatccggcagcttccaaccgtaagcatcggcgtaagcgtcaagattgacgacatggttgccacgcacagcggagttgatgtcggtgatacgggcaatgtccggggtgtcggcggcggagatgatgcgcgggccattctgctgggaggtgttgtccggatcgtaggtggccttgatggtgatgttcgggtacttcttctggaaggcttcgatcagctggtcatcaaaggtcttcaggccagcgccgtcccacagcttgagctcatacttggtatcgccaagatcagtgctcaccgcttcggtttcggtgttggctttgttgctggacgagcccgggccgcaagcggcgacggatgccaggcatgccacagacatcagaccggcaataacggttttggcggttcgttcaatcctcattgatcattcctttcttccttccgggcgatcccggctatgtcttccttggctatctcggcttagcgtatttgctaagcgcttatgcatgaggataacagatgtcgaaccggttcgtcaaatccgcaacacgcaaacaaatggccgattcccgaagaaatgaggaaggcttgacgttccccataggcaagcacttccttctcgcgaaattgcaacatcggtcccttaaatacctaagcgcttattcattcacctaggatgacgtttcgaaggctcgggcagctcgggaaaaattgaatgtggctcaatttgataccagtacgccacgctagacacatcatcctgacgctcaaatgcaccttcatatcctgaaccaatttgttgaagcgtgactctaagctcactatcaaacctgatgggatcaggaatatgccatcggtacaagccacgcataggtggacaataatcgtcatgatattggtttgctatagccccatcgcgcacagaataaaatggatatcctacatatggggcacaaaaagtacgctcgcgcgtatgaccatctcgctgctcagcgaagctccatgcaccgccaaaataatcttcggtgccggtactacacactgtgggataatcgttatcgccatctaggaaaaacttaatctctccctcaccccaccaatatcgttgcaacgtagaaatagcaagatatgtgccgacgtaatggccccgtccgctgactccatcgaggattacatagtcctcgcctaaagtagtgattggctgtctgcgccattgcgcatggaaataagccatttcacgggaggaatacgcattacccaatgcataatcaatctgataaaacaaagccggaatagcatgagcgtggtcattgcgcactacgatacgtgcccgtttacgaaacggcatcgtgaaataacaattcatacctcgtgtaggtgccaccacaataggctctgagaacacatcgcaactttgtccaaagccgcaacagaagaagtctcctaggggacattccacagaaggtcgcttttcatcatcccaatagatggcaagcaccgcatcgcgcagaacgtatcgatcagcgtcactggtgcgatccgtaacggtaaaccacatgtgccgaatacaaccggggccttcaatatctgccaatgtcacagactgcccgggagcaatgtcattcaaacacggttttcccttgcgcgacggccccaacggaccagtttcacggcaaccaaaacccttggctcccgttgggttctccgcattaatcgaacatgttacttcgtcgcggacagtcggcaaatccgataaagttcccgcgtacggtcctgccatcatcataggttgactctcctcaaatcaagcgtcgctagcgaaagcggcatatagttgaagctgtttctaccgcttcgcttctttgtcatattgcgcctgcacattctttgtgaattcctgaggcgtgatgctgttatccagcagtaactggaagttagggattagcccacttgactgcattcccgcagtagcattattaatgaaatcgctagtatgaccgctcgtcagcacgtcggcataggcatcaaacatactctgctgcaatgcgctattcgccttgagatccgaagtagatgattttggcaaatagccagaattgtcaacaataatctgttgcgcttcggcactttgcgtataatcgaggaacgccgcagcagcatcacggttcttagcattcaccggaataccataaaatgcacctgcattagcagcaacgttcggctcatcttcactggtggcacccgggaaagcaaagaactgaacatcatcacccagcgctttggccacagtatccagattccaattaccgctcgggaaaaatagtccttcaccattgcagaacctgctcagagcagtagaggcatccactgcgttaacaccttcaggcatatatcccttgttattccaatcctgcaaggtggacgcagcgtcctgcgccgcctgattgtcgaaggtaccagatttctgcaaaatccagttctgcacatcttccgcagaactgttattagccattaacgcctgaaagacaaaagaggtaccgccatccttggcatatgtcatcatcggcagtatgccggcatccttggctgtctgcatatccgcctcaaactcctcgacagaggtaggagctgcatcaatacctagctgctcggcaagcttggtattgaaataaatgccagtcaccgaataggagttcggcaatgcgtacaaatcaccgctgccgagcttgccatttgaatccactcgatacaattcagtctgcgaatcgggaacatcccagccgtacgcatccacatatgcctctaaagacaccaaatggttgccacgaaccgctgaattcatgtcggtgacgcgggcgatatccggcgcatcttttgctgaaatcacacgcgggccattttgtccagagacattatccggatcatattgtcccgtgatggtgatgtttgggtatttcgcttcgaacccggcaatcagcgcctcatctacagccttcagacccgctccatcccacaaagtcagctcatattttttattacctaaatcagtgctgacctcagtaggatttgtatcacttcgtgagctacttgccgagccgggaccacatgcagtcagacttccagcgataaatatcgcagcaagcgccgcgccgctgttacgcataatcctattcatcggttacctccttgcatcctcatcatatgcaatcgatatttctctttactgtcaccatttttcggcggcaataaaatatatttgcgatatcgattacgcacatcgtacatctttttgcggaacccgtcaaccttgcatcacaccaatggtggccttaacttcaaaatccagatacaatacaatcgattacgcaatgcaggagatcccatgagcgaaccaacaatctatgaagtagccaaggaggctggagtctctgcggcgaccgtatctcgtgcaatcaacggacgtgaccgcatatcggaaactactaggcaaaaggtatttgatgcatgtgcaaagttggggttttcagcatcgaaaacagcctccatgctgcgaacgggaaagacaaatcgtatagcacttaccgtaggtaactcactggctggctggttcagttcacaactagccgaaggcgtatattccgtgctcgcatcccaaggatatgacttgctatcataccgacttgcaaacgccgatcaaagacgcgatttcttttcctcaatgccagtgaagcgcaacgcagacgcggtcatcatctcctccttcgacatcagcgagacagagaggcgaaccttagaacaactcggtatgccagtcatcggcgtcaacaccatcgggcttacggaacagcgagatatgatttccatcggcgtagacgaaattatagcaatgcgacaaaccgttcatcagctcgcaggactgggacatcgcaatatcgcctttatctgcaagcagcaagacagtaacggattcatatgggaagctgaccaacgtatagaagggttccgtcttggcatggcggctgagggactcaacttgcccgacggatacatcatcgcagtacaggacaacgaatttgccggagcagaggcactcagtagcctgctcgcactctcccctcgcccaaccgccgtatgctgcatcagcgacgagaatgccattcctctagtccatgcgcttcgctcatacggattccgcgtacctgaggacatatccgtcatcggattcgatgactggccaatggcacaagcgctcaatatatcaaccgttcggcacgaccctcggtcctacggagcattagcggcagatgccgcaatccgattatcacgaggcgaaattctgacagaaagttgcatcgttgttcccacgacgctcatgttgcgcggcaccacaggcccagcacctcgagattaaacatcgacaacgtccgcatttgatgatgtgcatatcattattgcaacagcgaaacaacaggtaccagccagaggaaggacgaccgggtaacagccacaaggcggccacccattcaccatgaaacgcgcgaccatcaacgacgtagctctcacggccggagtctcaacttttaccgcatcccgcgctttgcgaggtaaggatcacgtggcagcagctacgcgggataaggtgctgaaagcggccaaagagctgaattacaccgcgtctcgctcggcggcggcgctggcaagcggacgcaccaatcgcattgccatgctggctcgcgaacggctggccggctggttcatgggcgaattattcgacgggctgtatgacgaactgagccgcgcacgctatgacttgaccgtataccgagccggcagcgtcgaggagcgtgcggaattctttactcggctgccagccaatcgtaacgccgacgccctcatcgtatccggattttccgccaccgatgaggaagccgacacgttggccagcatgggtatgcccatcgtctcggtgaattcgccgtatatcagctgctgccaagcctccgtggccattgatgacgaggcggccgaagccatggcagtgcgttatcttgcggccctcgggcatcgtcgtttctgctatgtggggcgcaccgatccgctgaccggcaaggaatggggattcgatgcacgcgcacgcggatacaaagatgagatagtctcgcttggcctcaccgactgcggcatccacttcatcgactcggaatcaccacgctcggccaaacaagtcatcgccaccatgctcgcgcagcctgagcggccgaccgctatctgcgtgtggtctgactactacgcattgcgcgtggtacatgagttgcaggcaatcggagtacgaatccccgaagacgtttcggtctttggctttgatgggtccgacgtggcggaatccattggattaagcaccatggtgccaactcccccgcgcgaaatcggacagattgccgcgcgcaaggcactgaatttggttgaggggaagaccttggacgaccctcatacgactgtacctgtggcggtcgagcccggcgcgaccagtgggccagtgcgggaataggcgatatgggaaaagcccccctcggcggaaaaccgaaggaggcttgggtggagctgcactacttcacagcgcctcgcatgactccaccgacgacccacttttgggcgaagatgtagacgatgaggatcggggccatggccatcaggtagctggagaaggccatcgggtagttggtggcgaactgcgagctgaagacgtactgggcgagcgggatggtctggttcgactggtcggtcaggatgatcaacggcaggaggaagtcgttccaggcccacagtgcggtcaggatggcgatggtggcgttaatcgggctcatcagcgggaagatgatggtccagaaaatgcgccacgtggatgcgccatcgattcgggccgcctcttccagcgaaaccggaatcgaacggatgaagccagtggcgatgaacaggttcgtgcccaggccgagcaccgtgtacagaatgatcaggccgacctggttgtccaggtgcagggagcccatctgcttcgcaatcggcagcatgacgaccgggaacggcacgaacatggcggcgatgaagaagtagtacaggaagcggaagaagcgcttgtccatgttgcgggccacggcgtaggccacgaaggtgttggtcagcagggtgagcaccacggcggccaccgtgatgatcgcggagttgagcgcggccttcgggtagttgaccttggcggaggcgtcggcgaagttgtgccactgccacgaggtgggcagggcgaaggtgccggcttcggccggagtcttcagcgcggtgacgatggtgaagtagagcgggatcagaatggtcaggctcagcacggccacggcggcggtcagccaccagttgatcttgtggtccctgcggaacttggcgggcttgccggacttggacggggtaactgttgcagtagtcatttcttatcctcccctaaatcagatctgttcctggctgcgggagatgcgcagctgtacgaaggcgatgatcgccagcacgatgaagaagagcacggcgtttgcggtctggtaggcgtactcgccaccggtcaggccacccttccagatgaggtaggtgacggtttcggtggaggagttcggaccgccctcggtcaaggcgacgacctgatcgaaggtgccgagcgcgttcttcatggacagcacgaggttgatggtgaagaacggtccgatcagcgggaaggtgatcttccagaacttctgccaggcattgacgccgtcgatggcggcggcctcgtagatttcatcgtcgatggtctgcaggccggcgaggtagatgagcaccgagtaggcgatgccctgccagacggcgaggaagacgatcgggatccagctgagttgctcattggtcaacagcgaggtggacagccacttgatgcccagcgccttgccgagctcgggcagggggttcatgaagatgtacttgaacacgtagccgatgaccagcacggagagggtgtaggggatgaagaagatggctcggaagccattcttgaaggcgatcttcgagttcagcagcaccgacaggaacagggcgatcacattaatcagcaccgtgatgagaatggcgatgaggaacgtgaacaggtaggcatggcccactcggttgtcctggaagagggcgatgtagttcttcagtccgatgaacttgtaatcgccgtagccctgcgagttggtgaaggaatactttacgccatcaagaaatggcaggtacaggaagaaggcgaagatgatggccgccggaaccaccatccagtagtaggcggggtccactttgcgggtggagaaggcggagaccttcttcttggcgggtttcttggcagcggtcttggttgcggttgcgtgtgacatgatgttctcctctcctaccgatcactcgaaggtcctggcttggaccttgtcccattcggtctgcatctggttcaggaaacggtcggtgttgccggaggtcaccatggtctgcaggtagccgccgatgttgatggacgaaggaatgtagtggtcgcagaagtcggccagtcggttttcctcgaagaacgggcgcacggtttccagcgcatcgttgccgaagtaggtgtccttcagcggcgtgatggcggactgggcgtcggcgtaggcgtcaagctgatccttctgcatgaggaattcgacgagcttcatcgcttccttggggtgcttggtgttcgcaccgatggtgagcatcacgtcgtcgccggcggtgaggatctgctcgctggcgtcatcggtggccggcatctgggcgaaaccaagttcgatatcggggttgatcagcaggatctgcgggatggcgtaggtgccgagcgggatgatcgcggccttgccttgggcgaagttctgcgtgccctgctggtaggtgacgccggtgtccgcagtggagtaggtgaagagctcggattccttctcgactgaggtcttccacagttcctggaacgtggtcttgccttgcttgagctcggtgtacttcgattcgggaaccagcgtgccggccagggaggcgagcggtgcctgggtggtccaggcgtcggccacggaaccctgcagcgggttgatgccggcgtccttgaaggtgttgagcatatcggtgaactcgctccaggtggtcggcgggttctccgggtcaaggccaaccttgcggaacagagccttgttgtagatgtagccggaggcgttacccgcgaagggcaggccgtacaggcgcttcttggaggaatcggtggtctgcaccagattcttggcgatctgcaccatgccggggttgagggtgtccacgatgggttcgtcggtgaagtcgtagaacacaccggaggcggcgaagttgccgaagctgatgtcgccgttgaaggtgatcacgtccggcacacgattcttgacgaaacgggtgcgcagatcggtctgggcgttggcggagttgttgatgttgaccttgatggtcgggttctgtttctcaaagtcggcgaccatggacttgaactggtcggcggcctcggacttgaactggaagaaatccagcgtgacggtgcctgcggtgctggagccgcagcctgccaggccgaagccgacggcgatcgcgcacaccacggcggcggtgcgcacggccagacgcttcagtctaggcgttgcatgtggggaatcggacagcataattgttgactcctttatctttcttttcctccggcttcggtgccggcggttcttccactttctaaggtaacagttcggccatttcattcccagcgccagcgagcccacttgcgcaagcaacaaaaagcgcggtattttgtgattaacgcaataaatacagcgaggggggcttgcatgtctgatgccaacgcgattccacagtggttttccggatccgagcatacgcatcgcgtggcggcggcaattgcccaatacgggccgatagcccgcactacgttggcacagatgctgggactgagccaaggggccttgtcccgcatcaccagcgatctgatctacgccggggtgatcgaggagcttccggccgaggccggcccgtcaggcaagctgcccgagcgattcacgccaagggaaagttcggatcgtcgcggacgcccgcagacttcgctggtgttgtgttcgaacgcacgcaccttcattggtgtcaaggttcatgggatgtcgattgtggccgctgcggtgaacgcgcatggcgaggtggtgtccggccggcacgaggtgccgatcggggcggatcaatcagctgagtatgtggtgtcggccatcacgcggctggtgcgcgaatgttccgccgatatcgcctcttccggactaccctcccccactgcggtgggcgttgcggtaggtgggcatgtggtcgacgattcgattgtgacgttcgcgccgttcctgcattgggacggggccacggacttggggacgatggccacagaggcgaccggcctgccgtgcggggtgttcaatgatatcgattctctgctggtggatgcctcctggttcgggccgggtgtcggcgtggatatgttcgccgtggtgaccatcggtgtgggtgttggttattcgctggccgtgaacggcaagccagtacagtacccggataagagctatggtctggtgggccacgtgcttatcgatccggaggggccgcgctgcaccagcggacatatcggctgttcacaatgcttgactgacgattcgatcgccgaacagtactctgcgattgtgggtcgcgcggtcagttttgaggactttgcgcgcgatgccaagggacgcgtgccgcaggccacgcagttggtgaaccggacgtgtttccggttgggatcgctggtggctacggtggcgaacatcgcgatgcccgggcatgtgctgattgccggggagtccgcgtttttggccaagctcggcaccgattcgctacgtgacggcattcgtttctaccgtcacagccagacccagccggtcaagttcacgattatgaaccacgactggcagctctgggccaaagccgccgccagtcgcgtgattgtgaagcatattgggtaggccgttcttggctcccctcagagaggggagccaagaacgttgcttcgccacagttactccgccacgaccagcaattacggacttgcctatcggcaaggctcaatcccaccttcgctcagctgtcgcttcgctcaggccgtggctactgacagcctactaggctgtcagcttaacgccacagccttgagcaatactgcctgctgggggtggagggacgggggacgaatgccgtagcgctgcagggcttcgccggtcaggactacgccttcctcgttccaccagccgagagtgctctggccgttggtcagaccggtcaaatccaagctcgggtcaagcgggctgacacggtaggtgcgctcggggtcaagtccgggcagatgcacgggcgcggccggataggtctggctggtggtcagctgggtgaagcggtagatggcggcgtcacggttcggcatcaccatgccatccaagcgcacggccggatcgttggagtcggcgtgcacgcaggtgtcgatggcgaaccagtcgcggtgcttcttgaattcggccacccacacggccagcttggcgagcgcctcgtccggctccttcaacaggttccattcgatgcccatgtggccgaagaacgccatggccatgcgcagttcctggctggtggcacgctgggtggagtgcgcgggactggcacccacgtgctcgcccatcatcgccggcggcaccagcagcgaggtgtagcgctggatgtccgcgcgctcaaccgggtccacgcagtcggagacccagatacgatcggcgtgctccaggatgccaagatccacgcggccgccaccagaggagcagctttcgatctcaaggcccggatgcgcggtcttgaggcccttgaagatgttgtagacggcaagggtctgcgcgtgcacggccgggcggccggagcggcgggaaccgggctcggtgacgagcttgttgtggtcccacttgatgtagtcgataccaagctcgccgacaagctggtccatgcagccgtagatgtagtcgaacgcatccggattggtcagatcgagcacctgctgagtgcggccctgcagcggcagtcggccagcggtgggcgagagaatccaatcagggtggttacgggccacatcggaatcggggttgaccatttccggctcgaaccacaagccgaattccatacccttggcgtgcacgtagtcggcgagcgccttcagtgacttcggaccatcgggccagacgtcctgcgcaatctgccagtcaccgaggccggaggtgtcgtcgcggcgggaaccgaaccaaccgtcatccaccacgaatcgttccacgccggagtcggcggccctgtcggcgagtgccttcagcgtatcgaagttgtggtcgaagtacacggcttcccacgtgttgaggatcaccggacggccgtgcgagaacaggcgcggatgcagggagcgcacgtaggagtggaagcgggcggcgatctcattgaggccatcgccataggagccgaacagccacggggtgtcgtaggagttctggccttcgccggggccggcgagcgtcacttcgccgccgaacaggagttcgccaccgccgattacgccggtcgtgtagggcagacgttcggcggacagtacggagttgccgctccagcccacgtgcaccgaataggcgtcgccatgctcgaagccgaaaccgggcacgccggcggtcaggagcagggatgcgtcgaagtcagggcggccagcgagctgcggcttttcgaaacggccgacggtcagcggctggcgctgcggactgcgttcacgtagatggtgaccggtggtggtgaggatttcgccggcggattcgggcagcgggaagccgagctcgatcttgccgatctcgagcggggctccggcgtctgcaccaaacaggttggttacggtggccttctgacggaccaggccgccggggagcagttcaaggtgccattcgacttccacgccctgctcctcatcgcgcgcggtgactatgacgccgggcacgcgggccgggccggtggcgcgggcatggccggccacatcggtgtagctttcgccggacacggcatcgagggtggcttccagcacgccgccggtctcgatgttggtcacggtgaacttggggaagagctcgacgccggcgcggcgcagcaccacgcgttgctcgccgatccagctttcggcctgggtgggcaggatggacggccagacggtgtcgtcgagcgcgccggacacgcgctgcggcttcagggcgtcataggcggccagcagggtgtcgggcttggccagcgggcgaccccagtggacgatgcgcggcaggtcgctgccggcaaacaccagaccgatcgccacattggcggcgggctgggtcaggtagacggcggtgagtgcggtaccgtcagcggcggcaccggtgaaagtcgaggtgttctcggccatattgtctccttcgacgtgtgtggattggcattgcactactggtttcgatggtagaagaaatggaatatgttgccttggtgccgcgtgttggttgcgtgaggtaagtaatgcgtccgtgtctatcgccgctgggcgaagaaatcagtcaggatggactgacactcgccttccaacacgccgccgtgcacttcaggactatggccgatatgcggatcgcgcggaatatcccaaatcgaaccgcatgcaccgagcttgggatcccaggcaccgaacgcgatggtgccgatatgggtctggatgcaggcacccgcgcacatcgggcacggctcaagtgtgacggccagcgtgcaatcggcgagattccaggcgcccaaggcttgggccgcctgacgcatggcgatgatttcggcgtgggcaagcgggtcaccatcagcctcacgcgtgttgtatccgcgcccgacaatctggccggccgcatccagcaccaccgcaccaaccggtacgtcaccagcggctgcagcctgaccggccagttccagtgcacggcgcatcgcctcgtcatattccataccaacgagtgtatgccttttctcatatcgtctcatgatgtgcataatcggccgcaagcttaacgttttcttcatggttcccatatacttttggtggagaaaaatttaagggagaaggcggcaacatggcggtatttgagctcatcctatgcatcattgcggcggtggtggtgagctcgtttgtcagtcgcttcgtgcccaaagtctccacgccgctggtccagattgtgctgggcgtgctggttacgtatctgccgtttttcccggatgcaacgctcgacccggaactgttcatggtgctgtttatcgcgccattgctgtatttggaagcccacgaaatcgataagtcggcgttgctgaaaacgctggatctgagcctatcgctggctatcggactggctatcgtcacgatggcggcggtcggattcactttgcatgccgtctggccgtccatcaccttagcctcagccttagcactcggcgcggcactcggcccgaccgatgcggtggccgtcagctccctcggtaaagaagcctcgctgacgcagcgtcagcgcagcgtgctgaaaggcgaatcactcttcaatgacgcttccggcatcgtcggcttccagttcgctctggccgccgccttcactggagaattcgccgtggggcaggccgccggcgaattcgtgatctccttctttggcggcaccttatttggcctggtgatagcagcagcggccaactggctattcgagaccgtgcgatccctcggctgggaaaccactaccacacgtattctgatggaactgttcctgcccttcctgctgtatttgggcgcggaggaattcaatgtgtccggcattctgtcggtggtggccgctggcctgttcatccgattcgaccgcaccggcgtggggccgaatgtggcacgcacgaatatcgtttccacttcagtatggggtgtgctgagtttctcgctcaacggtgcggtgttcattcttctgggcatgcagctgccgcgcgccatgatggccagctggtctgacccgtatatcagtaatatcgcgctgatcggcattattctgctggtcactctggtggtaatcgcgcttcgattcttctggattgcggccatgctgcgcgttgcgcgagatacaatctccggccagcgccgcaaaatgacacccgaacgctggcgctcggccgcagtgatgacctttggcggccccaagggaaccatcacgctgtcattgatgttcaccatcccgtattacattgccggcggtgcgccgttcccgatgcgtgacgagctgattttcattgcgtcaggcgtgattatcgtgaccttgctgctggccaacttcctgttaccgctattggctccgaaccgtggcaaggatcccagcgcggaaataattccggtgaccatcgatgtgttacgcgccacggtggaggaattgaccggacgcatcacgccagagaatcgtcgtgcgattctgatggtaatcgaccagtacaccaagcgcatcgggcgattgcagcagcgcatcggcgataccgatccccagggattcgagcaattgcagatcgaagcgctgcattgggaaaaggaattcgtgcgcgaccggcttgccgacaccaaagcacatccggcggcggatacggccacgcaagagctgaacgtcgaaacctgcgagcgcatgcttgaccagattatgaatacgttgcgtcacacttccactgatccgacttcggggcacgcggtatcgcagattcgcggtcgtgtacgcatgttccagcggcagatgagcaattacgccaaacgcacggtgtccaagattcgccacaccacaccattggtgagcgaggaccagattttcgcgcgcacccgcgaactgcaggtcgaggcgattcatcatgttatcggccggcttattgacgagatgggccaggatacgtacaacaccgagcattgttcggcactgttgctggattatcgtcgtgccgaggcttcattgcaggcacgtccgaccatgagcggcactacggaaaccatcacgcaggtcgaggacgtaaagcgcgagagctacggtatcgaactcggtatgattcaggacatgtacgaagccggcgacatcaaccgagcccaagcccgctccctgaggcgcaacatctacgttatgcaagtggacgctgattccggcatctagtttccctggctcccttctctgaggggagccaagttggggattgctattcccgtgtgactttgagggctacccagatgctgcgaatcagcagaaccgtcagataggttgcgaagagtattccgccggcacgcgggctcatggccccggcaatccaagtgcccagcggtgcggtcagtgccgccacaatgccgataatcagaccggctttggcatgcaccattttgcggcgcacattggccacggtggtggtcatggcattcgggaacatggacaacagcgaagtaccacgcgcgatcaaatcggacgcgccaaacaggatcgacaaagccggcacgcaaatcgcgccaccgcccacacccagcaagccagccaaaataccggcgagcacgccgaaaacaatcatcagcaagacagtaaccagattaaattcgattgacgaatcacgcgaaggtataaaaataagctggctcacgatgataaacgccataaacaccacgaacgcccagcgcagcacgacttccggcagtcgggacaacagcagcgaaccaatctgaccgccgatgaacatgcccaggaacatcagcagcgcagcaatccaatccacattgccttcaaccgcataggccagaacgccggacaccgaggtgggcacaatcgccaacatcgaagtggcggccgcatgccgctgggtcaggccgagccagaccagcgcgggcacgatgatggtgccgccgccaatgccgaacagtccggacaacagcccgaccagcacgcccaccacaaccataaccgcgatgccgcgcggggactcgtccacatgattctcttcagtatgtgcagtagtgcttgcagtgctcacttcgctcatgggagaacagtctatgaccgagtcagccacaagcgccctcgatgtccgattgctgcgacggccgcgccaattccagtgatggcggctgactacagcacgccagaggtaatgtcgttgtcaagtagccactggcgcaaatcggcgaactcctcaagactcacattgtgatccagaccgtggtagctcttggttttcagccacgtatgctcttccagccaagcggcggtggcgaacagttcgtattttgggattacgccatcgttcttgccgtacgtatagaacacggggatatcataatcggccaggcgagagtcggcgggggccgtgccgggcacctgaccgggtgcgttgaagccggacagggagacgacggcccggtaccgctcgggattgatacgcaacaaatgcacggcgaccagcccaccttgcgaaaacccaagcggcaccacgtcacggtcggcgggaatgttgtcggccacccatcggtcgactgctgtggcggcggcatacgcgtcgtagtcacgatcatcgccgataggcagggcatcgtggaaccacgcgtagttgccggggtcgagactgccctcacgggccggcgcgagtgtcagcggcccgcgcaatgccacgaaatcgttatatggagcgatgaggcgcatgatgtccgccatgtcttcttccctggatccccatccgtgcaggcacaggaacagcggatgcgcggcatgctggtcgaagccgccgcgcgaggtgacgctgtgctccacggtgagtggctcgccaaaacgtccgggcacagtggtggattcgcggccgatcagaggctggctggcattcgcttctttgctcataccattccaatatagaggtcttgcgcgctgtgcggaaaacgatggaccatgatttcaatcacattgggtaatccgcgccgaatcgccttgggacttttcaagggataccggcaatctgtcaggcgttaccgctgtctgcggtatctgcggctgcggtgattgtctcaagttcgccgccccactgctgctgcagtgcggtcatcttgctggcctcgccgaacaccatccagcgtttgccgttcagcaatcgccaatcacctttcgtttgctcattatcagcgtattggctcagcagttcggaaatcttgctttcgataggtgcccggctgatggctgcggacgattccgattcaaaggatacgaaggccactctcggatcagtgcacatctgtacggtggtgatgcccggcaaaccgcccgtatcaagcccctgccatccttctttgcacgcgccggcagcttgttcgatgccttgctccatctgtgcggtatcttcgacgggtgccttgtcgttcgactgctgaatcagtccttccgggaacaatacgcccacggccacgccgataaccaagcaaactatggcgcacaccagtgcgatgatgccgcccgcgcccactcccccgtgagtggcgtaccgaggcatggtgactcgcgcagcgatgaccagaatcagggtgatgccgataagcaccgccgccatcaacgcaatgtatcgtcctggcactgccgtcataaaggaaatggcgtaaggcgcgatctcatgaaccgccgaggtggccgataccacgacggctagcagtccgctgacaacggcaagtctgcggcacaatatcgacgttgggctgctggcttttgtagcggcgaatcgccggccggcatcccgcctggatgggcgtcgattctgtgcacgacgtgagctgcgcgaatcgtcatactgaccatcgccgaagaaatcgtagtcctcatcgttgcgggccatcggtgccccccttcctgccgattacacagctagtgtaccgctatggcttgggaatggcggtcattcgggggaatgattcagggcacaaaaagaaccccggcggttgcccgccggggagagaaaggagagagaagaagaaagggggttcaattgtcgggaactgctgcggctcctgatcagctttccgctgacatcttttatataaccactgctttctgggtctacctctaagtttctctgagaaaaacctgagaatacttgcgattgatggaccgcggaagcgtgaggagcctctcacgtttccgcccaaggcgctagacttgaaggcagtatttatttgcccaaggagtttttcacatgctgctgtccgaccgcgacattctcgccgcacagtccgcaggtcatatctcacttgatccgtggacccccgaaatggtgcagcccgcttccatcgacgtgcgattggatcggtacttccgtttgttcaataaccacgcctacacctatgtcgatccggcggaaaaccaaggcgcgctcaccgaacagttcgaggtggctcccgacgaaccgtggattttgcaccccggcgagttcgcactgggttccacgtgggaatacgtcaagttggacccgtccattgccgcccgtctggaaggcaagagctcactgggccgattggggattctcacccattcgactgcgggcttcattgaccccggtttcgaggggcatattacgcttgagctgtctaatgtgtcgacgttgccagtcaaactatggcctggcatgaaaatcggccagatgtgcttcttccagctgagctcgcccgctgagcacccttatggctccaagggcaccggctcgcattatcagggccagcggggtccgacgccgagccgttcctacgagaatttctaccgcgcgcacatcgacgactgagcgttgcgacgtaccattcggccggcggatgccggccatttgcttaatcccaaggagatgtcatgaccaacagcgatggcgggttccagttcgacttccagcagcccgaaaagccggtcaggccaacggttcctccgattcccgggcaagagacggcagcatatagcacagaacccacggcacaagccacaccggctctgcagttcccgcagtctgtgcagtctgcgcagcccacacagcccacacagtttgtgcagcccgcgcaagtagcgtatgcctcacaacccacgcaagctgtgccgaccgtacaagctgctcagccgacgcagcccatcgatccggccatgacgcaaccgttctcgccgcaattcctggctgcggttgccgcacaagcaccacagccggcggcagccacgcagccagtagtatccgaaacaccaatcgccgctgcgcccggccagcagcaatacgtttgggatcagacgacgcaaagcttccgcccggtggaaccgacagcgccggtgacgccagcagcaccagccgcaccagcggcaccggcgacatcgcctgtttcggtagcttcaaacgccgcgacacaggcgttccaccccaatcaggccgagcagcctgcggtagatgccgaggcaacacaagcgttccagcctgatcaggtcatggcaacacagcctttcgaagctcaggccatgccgaatgccgaaaccgcggccgcacaggcatacggcgcatcatccaccgtatccggtgagaccgttgccatgccggcaacgcaagtagcgtctgccgatgatgctgcagccacacaggtgttccaaccggccgccctggccgcttcggcacaggctcagcctgctgtgatgcctccctccattccgttggatcaggtctccgatgaggacgattccgatggcgccgagcctcgtcacggcggtagcggcaaaaagaacaccagcaagatcgtcggcattgccgtagcagtagtcgccgtgatagcgctggttgtcgccggcctgctctggtggcattccaacagcagcaaggcgagccaagccgtggcattggccgagtgcaaggtagcggccaagcagtacacgaatgctcagaagaagctcaccaccgccatatccaatggccaaaccagcgcgcaaacatccaccagcgatgtggccgacgccaatacgctcaccacgctaaatcaggcgttgcaagacgccggcaatccggctgacaccgccaagtgcgattccagcctcaacgccactgagttgaagtctcacactaaagagctgcagaatgatgccagcgacatggctgacaagacggatgccatcaacaacgcgatcaaggccgttaatacttcaaaggcgacggccgataccaacacactgaaatcgaacctgagctcggctatttcgcaggcgcagggcacgctggataattccgcgggcagtgtggccgatgaaaacacccgcaccgcgctgcaaaacgccatcaccgaggccaatacggtgatgaacgggaccagtccgtccgaatccgacgtcaataatgcgatttctaaactgcagaaggccgagtccgacgtcaccgcctcgatgcaggccaagcagcaggcagatgccgccaagcaagctcaggaagaggctcagcagaaggccgaccaagaggcacagcagaagtctcaagacgagtccaacaatagcgacaacaataacggcggcgacaactccacctctactgacggcaccgacggcagccacaactgaggtctgcagcgttctcctgtttctcatggggcggtaacttcctcatgtggcggttagcacatttccctttttcgcggaataatgccgttttcagcgaccgccccatgaggaaatcaccgccccatgggatagttaccgccccatgaggagccgtttggatatagcagtgggccgggctctgaataccagagcccggcccactactatatgcccacaatcagggctattgcgatggcttaacgcttggccatcgcgcgtagcacaatcttgcgcagttcggaggcaatcagcacgattgcggccaggcagatgcattccacccaagccatcgggctcaatgccacggtgccgaacggaccgttgaggaacggcacgtaaatcaccacgagctgcagcgccacggacaaaccaatcgcaccccatagccacttgttggagaacagacccacgaatgcggactgcagatgcgaacgggaggacagcgcgttgaacagctgggcaaacaccagaatcgtgaagcccatcgtacgggcctcggtcatctgcgcttcatggccgatggcatccaccgagcggtcggtgaacaagccgccggacaggtgcatgtccataccaatcagcgtgacgatggccatgatgacgccgatgtagatgatgtcgccccacatggaggcgtcaatcacgcggtccgtcaccttacgcggtttacgacccatcacatcgtcggtctgcgggtccacgcccatagccaacgccggcgcggcatcggtcagcaggttgatccacagcaactgtgtggcgagcagcggcacggtgacgcccacggtttccggctggcggatgccgaggaagccggcaaacaccacaccgaggaacacggtgaacacctcacccacattggaactcagcaggtagcgcaggaacttgcggatgttgtcgaagatcacgcgaccctcgcgtacggcggccacaatggtggagaagttgtcgtccgccagaatcatcttggcgctctgcttggtcacttcggtgccggtgatgcccatggccacgccgatgtccgcggacttgactgccggggcatcgttcacaccgtcgccggtcatggccacgatgttgccttggcgctgcaaggattcgacgatcttgagcttgtgctcgggggccacgcgcgcgtacacggacacttcggacgtggccttgtcgagcgcggcctcatcgggcagctggtcgagctggtcgccggtcagggccttgccatccttggcgatgatgccaaggtcggaggcgatgcgggcggcggtcagcgggtggtcgccggtgatcatcaccgtgcggatgccggcacgatgggcctcggtcacggagtcgcgcacctcggtacgcggcggatcgataatgccgaccatgccattccagatgagatcggtttcaatggcttcggcctgatcggcgatgtcggacacctggcctgcagcattgacgcttacaccgggcacatcagccaaagaactggtttccagcggacggcaggcctcgccaagcgtacggtaggcctcggaggagagacgttcgacggtggcgagaatcgactggcgatcgccttcggtgagcttacggacctgaccacccacgcggatgcgcgtgcagtagctcaacagcacgtcgggcgcgcccttggcgaacacggtgagcttgtctgaatcggtgctgtccttggcgatgatggacatgcgcttgcgttcggaggtgaacggaatctcgccaacgcgcgtgtagcgcttgatcttgcgatcggccttgaccttgcgtgcggccacgatcagcgagacttcggtggggtcgcccacaatctcccaacggccgttctcctcgcgtagttcgccgtcgttcgcgagcgtgccggccacgagcgtggcgacgacttcatcggccacaatctgggcctgctcggattcaggactgacgccgccggtcataaccatgcggccttccggcgcgtaaccggtgccggtgatctgcacttcgccggacggggtgaccacacgttccacggtcatctcgttgcgggtcagcgtaccggtcttatccgagcagatcacggaagcggatcccaaggtctccaccgaatgcagtttcttgacgatggcgttgtgcgcggccatacgctgcacaccaagcgccagcaccacggtcaggatggcggccaagccttccggcacggcggccacagccagcgagacagccaacagcaaggaatcaatcacgtcatggacgtcgttgaagccttccagcacggcgagcgccaccagcaccacgacagcgatgacgcacaccgcaatgccaaggatcttggagacgtaatccatctccttctgcagcggagttttctcatcttcggtggcggagagcatgtcggcgatcttgccgacctgcgtattcataccggtgccggtcacgattgcgcggccggtgccttgcgtcacggaagtgccgttgaagatcatgttggcgcggtcgcccagcgccttggcttcggtgagtgtgtccggcttcttgccaaccggcacggattcgccggtcagtgaagcctcggcgatgcgcaggctggccgcgttgaccagtcggccatcagcggagaccgaatcgccttccgcaaggacgatgatgtcgccggggaccacgtcggcggtgttgatgcgcatgaccttgccatcgcgcagcaccgaggtctgcggggccgtcatttgtgcgagcgcttcgacggccgcctcggccttggcttcttgcatatagccgagcacagcattgacaatcaggatcaagatgatcacgatggcgtcgaacggcagcacttcgccgccttcagcgccgggctgcgcattggctttttcgatgaaccaagcgatcaccgagataatagtggccgcgatcagcaggtagaccagcggatcttggaattgggctaggaatttcttccatttcggtacgggcggggcgctggcgagctcgttcgggccgaatttggccagtcggcgcttggcttcttcctcgctcaggccgtgggatgggtcgacgttcagggctttggccacgtcgtcggcgctggtcagacttggatcagtatcccccaatagcgcttcctgtgcgcgcacctcttccgattccacgaccccgttcgttgcggtcgtggacactgcggattgatctttgagatcatccataatgttctccttggtattgccgcggagtagtcagccttgcggccgctgccgggttttctctcccggctggacgcacaggactgcgcggttatggacaccggcgcaactgctgccgatgcatacgattgccattattccataaccgcgtggcgcacttggcgcacccgttgtctaaatgaaagtgcaacacccgttagattggaaattgcctagaaaaccagtccgaagggatgtcgcacctatgggagaagtatattcgcacctgtcggaagaggaacgccaggtcatccagatcgaggtaggcaacggcgccagcatacgcgggatcggcgcgatgctgggccgcagcccgtccagcatcagccgggagatcaagcgcaacacatggttcccgtccaacgagaacgagtcgtaccgcccgtaccggccgaaaagactgaaggcggggccatggaccggccgctactacatcgccgggcccgcgcagcgcaaggccgaccgcaggagatccaagccacgaaagccctaccggctgtcgcacgaccgcctgtgggcgcaggtggccgaatggctgggccgcggctggtcgccgctgcccgtcagcggcaggccgcgcgtcctgtggccggacgatgcgctcatgcgcgtgtgcccggagaccatctaccgatgggtctactccagcaggccgcttcgggaacgctgggcgcggtgcctgccgcgagggcacaggcggcgccgcaggcacggcggcaggaggacgtcgcgcttcccgatccccggccgagtgcccatctccgaacgcccgccggaggccgacggcaggagcgcgttcggccattgggaggccgacagcgtcatcggagtgggatgcaacctgcacaccgaggtggagaggaggaccaggttcctcatggcccgcgtcgttccggacaagaccgccggcgagagcgtcggggcgcagctggacatgttctcgccgctgccggccggcgcgcgcgtcagcgtcacgcacgacaacggcaccgagttcgcccaccacgaaaggctgcgcgacgggctgggcatggccacgtacttcgccgacccgtactccagctggcagcggggaagcaacgagaaccgcaacggcatgatccgccggtatctgcccaaacgctgcgagatccggatggacatggcaaaggaggtcagggagatcgtcgacgagatcaacaaccgccccatgcgcgtgctcggctaccggacgcccgccgaggcgttcgccgacgaactgttagaattacaggaccaacaagggtgttgcacttctaaatagacatcgggcacagcgtaatagcgttttgcctagaacaggcgacgcaaccaggcctcagccaaatcaggccaacactgcacgcattcgacgatgtgcgcatagaagccgttaccggcagtttccgcattggccaaggacaggccgtggctgccttcagggaacaggtgcgcctcaatgctcacgccggcggcccggcaggcctggatgagcattagcgtgttctccacgggcacggcgtcgtcggtcatggtatgccagacgaagacgggtggcgttttggcgtcgatgtgcttttcgatggagaacttgtccagcaaagcctgattgtgagcttggtcccctagcaggcattggaagctgccgcgatgggcgtacttgccggcggtgattactgggtacgagagcatcagcgcgttcgggcgcacggcgtccgggtccatgccgccctgttcgcggatgtcttcgtcgccgaccgaggtggcgaggttggcggccagatgcccgcctgcggaaaagccgagtacggccacttgcgcggggtttacatgccactgatccgcattggcgcgaatcaggcgcattgcctcggcagcctccagcaaagccaccggatagcggctgggctgcaccgaatagcgcagcacgaatacggcgaagcctttggccaggaatcgcagggccactggctcggcttcgcggtcagaagtcatggcgtagccgccgccaggcaaaatcaggatggccgggcgtatacggtccggttccatctcctcgctgttgtcggccacatagccgaagaatcgcgcctcgctgccatcaatgccaacgatggtttgttgaatgtattgcatgccatacatcatacgcgcagagaatagttctcgataagaaccactcgccatatgcggtcttgcccgtatctccaaaccgaataacacttacagcgaatcgtgaagactgcgggccatggcgcggtcgcgcgagcctttggtgagcttgagaccgagggtcacggcaatcaacacaacagtgcaggcgatccacagcgttcgaccgccgaagttgctgatagtccagccaccaatcagcggcgccagcgcaaccgacaccgaccacactacgttgtagacgccctgatacgtgccacgcgccgacgcgggtgccatggcggcaaccgtagtggtggcgatagggaatgtgcccagctcacccagcgtccacagcactacggcaagcgcgaatccgccccaagaatgggccgcggcctgcaccgcatagccgatgacggttacggcgaggcccatcaccagcacgcgtgaattgcccatgcgcgcgaacagtttcatcgcgggaatctgtagcaggcacaacataccgccattgatggtgagcagcaccgaatactcgcccagccctagaccaaggtccgtcatggcaatgggcaggccggaggtgctttggaagtacacaaggaagtagccgaacatcagcagggagaagccgaggaatggagtatcggtgagcacgcgccgccaattgcgagacatggcgcccttgacactggcagccggtgcggcatccgagtgattcggcctctcaatgccggcgaattccgcatgggtaacactgcattcgtcttcatggcgcaccgcacttggcaccgatacagtaatccccaaatgccgcacctcgcggaagaacgcaatcagcaatatcgtgacggctatcatcaccgccgcttcaacgtagaacatcagcgaatacgagatcttgaccagctggttggccacaatcggtccaatcgcgtacccaaaattaatcgcccacgattgcagtacgtatgcacgttgctgacgttcggcaggcaccacatccgcgatatacgcggcgatggccgggctgggcagcgaggcgaacgcaccatagacgaacagagccgcgcctaaagacacaggatcagtgagtacggaaacgaccagcagggcagccgctgcgccgatttcgccgatgataatcatggattggcggccgaatctgtcggacaaggtaccgccgaacaggcagccgatgattgcgccgaagccgtacatggccacgactgtgcccaccacaccctcatcgaggcgcagcgcggaaaccaaatatatcgacaagaatgaggtcacgaagcgacccatccacagaatcagaatcgccaaccataatccccaatacagcagggacagtccgaatatcatacgctgcttcttcactctcaataccttaccggctaccgacggcggaatagccgcgttttggcgcggggtgctgggacaatagcacctatggctatcaaaaaaggaccgaccaaggggtcgggtggcaagcatcgcaacaaactgaagggctacggccccactcccaaggccgaggaccgcgtctatcacaaggcgtacaaggccaagaaagcggccgaacgtcggcagatggccgacccgcgtctggcagcccgccgtcgagtggacaagttcgcttcggcggatacttcggatctggtgtacggccgtaattccgtgctggaagcactgcgcgtaggcgtaccttcttccacgctgtacatcatgtctcgtattgaacatgacgatcgtactcgcgaaatcgtgaaaatcgctggtatgaacggcctgcacatgctggaggccgatcgtctggagatggatcgtatcgcccgctctggcaaccatcagggcgtgattctgaaggtcgatccgttccagtactcctcgctgaacgagctggccgatcgtgctgagaagaaggccaaggcaatggaggccgcgaattcggcggccgcccgtattgctgcgcgaccgctgtttatcgcattggacggcgtgaccgatccgcagaacctgggtgccgtgattcgttcggcggccgcattcggtgccaatggtgtgattctgccggaacgccgttccgcttcagtgaacgccgccgcttggaaggtgtctgccggtgcggccgcgcatatgccggtggcgcgcgtggtgaacctgactaaggcacttgagggcttgaaggagcgtggatactacgttgtcggccttgacggtggcggcgataagctcgtcggcgagactggctttgaatccgatccgctcgttgtagtgctcggttcggaaggcagcggtttgggccgactggtgcgcgaaacctgcgacgcgattgccggcatcccgatcagctcgtctgttgagtcgctgaacgcttcagtggcggcgggtatcagcctgtacgcggtgtccaacgcacggcgcaaggctgcggcggagtgattgtcgcttgaggccgtaataggttgtacatacacggaagcccctctatttgaggggcttctttgtgtgatgggctcacctacagacagtccaccggattgtccgcttaatgactccacactgccgcatccggatcgtcatcggggttgtagccgtcgtcgtccgggtcgctgtaggtggattcgtcgtcaatgacgccggaatcggcctcttcgttaagttcggcgagtgccttggagtcaaggctgtagctcggcagagcgttgtcgatgtagctggtcacggcctcgcccatcggcacgtcgtggccggccttctccgccaggaaccagcgatggtcaagcacctcatggaagaactgagcaggctcgatctgggagcgatattcgcgcggaatcatacgcacggtcggctcgaacacctcacgcatccagtcggtggccacgatttccagatcctcgccctcacgccacgtggaggcacggtaggcgtcaaggtcgttgagcagacgacgggcctggttctcctgcacgtcaaggccggtgaggcgcagcagcttgcggttggcgtagccggcgtccaccacgcgcgggcggaccagcacacgcttgccgtcctcggcggtcttcatttccagctcgtccacgtcgaagcccagctcgttgagcttgttgacgcgctgctcgatcttccacatttcgtccgggttgaacttgtcggtgtcggtcagggcgctccacagcgagtggtagcggtcgactaggcggttgcccacctcgatctcatccacgtcgccgggcagtagcttgccggacgccaaatccataagttcgccgatgatgttggtgcgggccaagtcgatatcgtattcgcgctggccgtcggtgagctgggcttgcaggtcaccggtctcggcgtccaccaggaaggcggagaaagcgtcggcgtcgcgcaggaacaggacgttcgacagggacacatcgccccagtagaagccggccaggtgcaggcgcaccagcagcacggcgagggcgtcaatcagtcgttcggcggtgtccgggcgcaggttgcgggcgaacaacgcacggtacggcagcgagaacttcaagtgccgggtgaccagaatcgcctccagcggctccccttcacgggtatgacggccgatgaccacggcgatcggggtcacagttggcagttcgagcttctgcagtcgacgcaggatctcgtactctcgctcggccacctggcgcgtgatctccttcatggcgtacacctcgtcgcccacgtgcacgaatcgcacgacgtggcgggagatgcctcgcggcaggttggccagcaggtccttaggccaggtggccaagggcttgtgccagggcagcgtgaacatctttgggttcgagctggcggcggtgattttcagtgcttgcggttcggctgaattggcgtgttcgtcttcggctttgacagacgtggccttcagcgcacgcggatccatctggggcaattcgttcaactccatgtgttcgattttacgtgtcgttcgcgatgtgtgctcctttgccacgacttcggcgcgttatgtttacgggaaaaacaccgtttggtctctccctcagaccgtctaaaaggcaaaagaaaagccccgcagctatgcagggcttttccaacgaggtcataagagaggaagagaataacctcgtttaatggttgacgaagcgattagacctcgccaagtatctattagttcagacgcagctcagtcgacggagcgaacaggtgcatcttggccgggtcgatcttgatcttgacggtcgcgccaaccttcggcagcgcacgcggattcacacgaatcgtggtgagcttgttctggtcggacatgacctgggaagcctcagcggcggagccatcggtgatgatgttgccgtagatgtagccatcggagcccagatcctcgacgttgacgaccttcagggagaaggcgttcgggtcgtcagccggggccaggccagcgtcctcaggacggaagccgaccacgatctggccgttgtcttcggcggtgagcttgttgacggcctcagccggcaggtccacggtgtcctcaccgatcttcgccttgccgttgaccaccgggtgggtgttcaggttcatcgacggggagccgatgaagccggcgacgaagacgttggccgggcgatcgtacagctcggtcggggcgccgacctgctgcaggataccgagcttgatgacggcgatgcgatcgcccatcgtcagggcctcggtctgatcgtgggtcacgtacagggtggtgacacccagctggcgctgcagagcagcgatctgggtacgggtctggacacggagcttggcgtcgaggttggacagcggctcatccatgaggaagaccttcggctcacggacgattgcacgacccatggccacacgctgacgctgaccaccggacagagccttcggcttgcggtcgaggtactcggtcaggtcgagaatctcagcggccttctcgacacgcttgcgaatctcgtccttcggagtgccggcgatcttcagggcgaagcccatgttgtcggcaacggtcatgtgcgggtacagagcgtagttctggaacaccattgcgatgtcgcggtccttcggctgcatcgtggtgacatccttgccaccaatgaggatgcggcccttgttgacctcttccaggccggcgagcatacgaagggtcgtagacttaccacagccagaagggccaacgaggacgaggaactcgccatccttgatatcaagattcagatcatccacggagggcttatcgttgcccgggtagatacgagtgacgtggtcgaaaacgacttctgccataattactaatcctttcagaggcaggtacgtgcctcacgatccgttgtaaagggatttgttctttactgtgcttccgccctcgccaccgacgtacaactttgctttcggaaactgcaagcttcagcgtttacttttttccggttcagtgaaggttctcttcgttgagccgagaactactatacacggaccgtggaccaaggcaagtggcgtgtctgaaatgtagttaactttatgggcgtttctgggggtgttgtgtggttcggcccatgacacgcctgtttctcgaacgtgcgaaccggcacgcccggcgtagagcaggcctgctcttcccggactgacggattccatcagtcgccgactaatgcgacacagactcgaaggtgacgccgttgcgggcggctttgcgctcggccttgcgctcctcggcgttttcgatgcgctggatgcgcagctggcgccagtcctcgcgcatgtcgcggaaacggtcggccagcgttacgtcatcgttctcggcatcgccatcagtaccgctgccatcggccttaccgaacgtgccatcggccaccttggtgatgcccagcttgagcagtccgagcaactcacgcaacgtttccggtacgggctcatcgccctcatcggcggacttggtcaggccctcgatgcgacgacgaagcgcgtcggcgtcctcgggatcgatcttgagcccggcgatcagcgactggcgcatggtctcgtaatcgaggttggcaaaaaaattcagctgttgcagcgtcatgaagcccttgagctcggggaatcggtggacgatgtattcctcgcggtcgtcggcggcgcgggtccagtcgcgggtgagctgcggatcccagttggcggtaatcgatccctcgcgcatgcggtagtggtacagcgccttgggcagacggaccacgcgcgtggcctcgccgatcacgttgcagatacgggagagatcctcgattttgcgacccaccgggaaggagaatccggtgccctgataggtggaggcgggtgccaggaaggcccagaaatagccgtcaatctcagccttgacttgctttttgatgacctcgaccggggtcaggacctgcacctcggtgaagtcgttgtggcgatagttggacagcagcggcttgttgttctcggagatggtgtcgaactggaacatcacgaggtcggcgtcatactcgcgcatggcgttcaggcagtcctccaccaacgtgggtgccacggtgtcgtcggaatcggcgaagtatatgtacgcgccgatagcctcagcgataccggagttgcgggcgtcggacaggccgccgttgggcttgtgaatcacgcgtatgcgcgggtcgcgggcggcccaggcgtcgcacatggccgggcaattgtcgggcgagccgtcgtcgaccagcagaatctccagattggcgtacgtctgcgcggcaacagacgccacgcattcgtcgaggaacttctcgaccttatataccgggatgatgatgctgaccaacggctcctgttccatatctccagcgtagcgccgccgtgcgaacgcggcggcgctgcgggttcgcggaccgcgaaacccttagaagtcccagtcgtcgtcatcggtttcttcggctttgcccatcacgtaggaggagccggagccggagaagaagtcgtggttttcgtcggcgttcgggctcagggcggccaggatcgcggggttcacatcgcaaatctcagccgggaacaaagccgggtaaccgaggttcatcagcgccttgttgccgttgtagcgcaggaacttctcgacgtcatcggtcaggcccacgcgatcgtacagcgactgggtgtactccacctcgttgtcgtacagctcgttgagcaggtcgtacgtgtagtcctgcagatccaggcgctcggcatcgctcagctgggcgatgcccttctggtacttgtagccgatgtagtagccgtggacggcctcatcgcggataatcagacgaatcacgtcggcggtgttcgtcagcttggcgtgcgcggagaagtacatcggcagatagaagccggagtagaagaggaacgattcgagcagggtggaggccaccttgcgcttgtacgggttgtcgccctcgtaatagtcgagcacgatctccgccttcttctgcaggaactcattgttctcgctccagtcgaatgcggcatcgatctgctcggtggagcacagggtggagaagatggacgagtagcttttggcgtgcacggattccatgaaggcgatgttggtgtacacggcctcctcgtgcggggtgagcgcgtccggaatcagggagacggcgccgaccgtgccctggatggtgtcaagcagggtcaggccggtgaagacgcgcatggtgagcgtgtgctcgtcctcggtcatcttctgccagctggggatgtcgttggagacgggaactttttcgggcagccagaagttgccggtcaggcggtcccagacctcaaggtctttctcgtcttcgaggcggttccagttgattgcggagacgcggtcgatgagtttcagcggtttgcgcggaatggagataggtgccatgagtagtgttccttttactcgttgtcgttatcgtcgttggatttgttttcgaactcctccggcgcggtcagccggagcagtgctctatagacggttcgtgacattgttggttccttagatggtggagcccccctcagtccgcttcgcggccagctcccctctctgaggggagctgtcggcgttagccgagtgaggggagtaacaacggctctctggttgttcaatgcgtgcggagaccgccgtctgaggccgaaggcgtacgaaggtacgtcgagtgccgaagaaaggcggtatacgctccctcgaacgatcagagcatgcaggagacgcagccttggacttcagtgccttccagggcttgctggcggatgcggatgtagtagagggttttgatgcccttgcgccaggcgtagatctgggccttattgaggtcgcgggtggtggcggtgtccgggaagaacagcgtcagcgacagtccctgatccacgtgctgggtggcctcggcgtacgtgtcgacgatggccttccagccgatctcgtaggcgtccttgtagtacccgaggttgtcgttggtcatgtaggcggccgggtagtacacgcgcccgatcttgccttccttgcgaatctcgatcttggaggcgatcgggtgaatcgagctcgtggaatggttgatgtacgagatcgagccggtgggcggcacggcctgcaggttctggttgtagatgccgtccttcagaatcgcgtcgcgcagggcctcccagtcggccgcagtcgggatcgcgatgccgtactgttcgaacagcgcacggacccgttcggtgcgcggagtgagcgaacgacgaccatcggtgtacttgtcgaagtagttgccctggccggccggcttggcgtagtcgctcgtagcgaagctggcgaacgtgcggccatgctccacggcgagcgcgtgcgaggcacggtaggcgtggtaggccacggtcatgaagtacatgtcggtgaagtcgaggccctcttcagaaccgtactggatgccttcgcgggccaggaagccgtgcaggttcatctggccgagaccgatggcgtggccctcctcattggcgcggcgaatcgaaggcaccgcgttgatgctggtgtgctcggccaccgaggtgagtgcgcggatcgccgtctccaccgtgtggcccaagccgccatccatcgccttagcgatgttgagcgaacctagattgcaggagatgtcgcggccgacatgcgcatacgtgaggtcctcgttgtatgcgctcggctcctgaacctgcaggatttccgagcacaggttggacatggtcacgcgaccttcgatcgggttcgcgcggttgaccgtgtcctcgaacacgatgtacgggtagccggattcgaactgcagttcggcgatggtggtgaagaacttacgggcgtcgatgtaggtcttcttgatgcggtcgtcggccaccatctcgtcataatgctcggtaacggagatgtcggcgaacggcttgccgtacacgcgctccacgtcgtacgggctgaacagggccatctgggccttctgtttggccagttcgaacgtgatgtccggaatcaccacgccaagagccagcgacttgatgcggatcttctcgtccgcgttctctcgcttggtatccaggaagcgcaggatatcagggtggtgggcgttgaggtacaccgcgcccgcgccctgacgtgcgccgagctggttggcataggagaaggagtcctccagcagcttcatgaccggaatcacgccgctggactggttctcgatgtgcttgatcggggcgccgagctcgcgcaggttgctcagcagcagggccacgccaccgccgcgcttggagagctggagggccgcgttgatgccgcgcgaaatcgactccatgttgtcttcgatgcgcaccaggaagcagctgaccggttcgccacgctgggccttgccgaggttcaggaaggtcggggtggcgggctggaagcggccggcaagcatttcgtcggcgtattcgatggcctgctgctcattgccggcggcgagctccagggccacagcggcgcaacgctgcgggaagtcctcaagatagaggcgaccatcgaacgtcttgagcgcgtaggacgtgtagaacttgaacgcaccaaggaaagtgccgaactcaaagccggcggattccacgtgctcgtagatgcggtcgaggaattcagcggagtactggttgaagaccgcagggttgtagtactggttgctgatcaggtattcgagacgctcggcggtggaggcgaaccgcttgctgttggtggccacgtgccctgtcacgtattcgcgttcggcggccttgtctttgtcgaactggatcttgccgtcggcgtcatagaggttgagcatcgcgttgagcgcgtggtaatcgtgcgccgggtcgtactgttccgctgcggtgtcggcagtattgtcgagcggcaggccggtggcggtgaggtcagtcattggaaatccttggaatatggcagaagtgtgtttactcagacagttgctcccccagtcaacttcgttgacagctcccctcggagaggggagccaatacctcgagggggtcaagatttactgttcggtgaagaagcggacgaggccgtttcgcacggcggcagtgtcttccggggtgcccatgagttcgtaacggtagaggtagggcaccttgcatttggcggcgatgatgtctccggcggcacagtaggcctcaccgaaattggtgttgcctgaggcgatgacgccgcgaatccactcgcggttggctggatcgttgaggaagcgtttgacctgaatcggcactgctttcttgaccacgccgccgccataggtgggcaccatgatgacgtacggttcgcggacgtttagcgccgggtcggcggcccgcaacgggatgcggtagacgttgatgccttcgtcctgcaaacggcatccggccacgaaccgtgcggtgttttcggaggccgacgagaagtagaccaatgcgccgatcgtcttgccttcggccgcgaattcgggctggctcagactcacgcggacaccgtggcggcggcgcggttgtcggcggccacctgctgggcgacttcgcgaatcaggtcggggcggtagccggtccaggagttgtccggcgtgatgaccaccggagcctgctggaaaccggcggcctgcagctgctcaagggtggaggggttctgcgtcaggtccacggtttcaaacggcacacccagcttggtgagctggcgcttggtggcatcgcactgcgggcaatgcggcttggtgaacacggtgacggtcatggcgactccccttgatgtggttctgatgaacagtgaagcgaaggccatattacagcggtgtgatttgaaatcaaggcactatatgtagtggcgcgtgtcacataacaaacctagatatagggtttttcgttgatattccgccattcccatgcacccccgaaaatcggcgtgcagcgacccgcccaatcacatgtggcattgttcacatttgcgtttgatccgctcttcgactgatcctcaaccgccctgcaaccgccatcttgagtttcgaggggctgttttgaccctttccggagatctatctccgtttcgaggggctggtactcaagtaagcgcatccccaaaatggcggaatgacggtggggcgaagccgtttatacccgtgttctagcgggccaccagcccctcgaaacgggagtaaacctctacggaaggccaaatcagcccctcgaagcggagaacggatacctcggcaccccgtgtggagccagaaggcccggccggatgtccaaacgagcatccggccgggccttaaaagtagttgttcagttatcagaatcgatgcggcgcgatactactccgcgtctttacggctccaacagatcttcgatgcggcagccaagcgtgcgggccaaagcgagcacggtggagacggcagctttgccaaggtctttgcggcgctgctcgtacatttggatggagcgcagggtaacgccggagcggcgggccagcccggattggctgagtccggcgcgcacgcggatcgtgtgcagccgggagtcgccctcggtgcgattatgggcggcccgctcgtcgtacacgtcgacgaatcggctttcgtcggcttcgtgcagagtcgggtgcagtcgcacgatatcgtcgagcgacagcacatcgagaatgtccgagaaccgcactcccctggcccattggcagtatgcgagtacccatccggcccagtattcgggtgttgagccggcgcgcagtgcggctggcggcatatcgagaatgcgcgcccaaccggtttgccgcatgatttcggccaccagctcctcgccggacatgccacacacgtatttgggcgtgcctcgcccgaaaagcgcggccgcctcggaggtggcgaagaagtccatgaataggccgaccggcaacccgcaatcgttcagcgcataatcgaaggcgccggccaagttggccatggcgtccggcaagtatgtctcatcataggcggggatcatcgttggtcactttctcgcggatgatgtcgcgcatgaacaggccgtcgagatcggcttctgcacttttgcggcggtaggcttcgcgagctgtgcggtcgcgctcgttacgcaatccgtggtaggtcgaagcgcgggcgatttcgcagccttggaaccgcagtgccgcgaatgcctgaggactggcgagtacgatctgcttgccgagctcgcccaaccgcatcgcctcagcgagttggtcgatggaaatcgcgttattgacaaaagcgcgggcgaacgagaaatacgaatcgtcggcacgatatccgacgatgacgtcagcctgactggcatccggcagaaacacttgtttcagatattcgatgccttgcgcggcgacggcggtggtcggctggaaacgacggttttcgaccagcatggccagccagttcaggatggtgtagggcggctgggacaggtccaggaagaggagcccgtccgtggtcaacgtgtaccgattcgcgaaaccgtcatccagtcccgcgcacgcccattccttggccagctcgacgctgcgcgtgcaatagaatccgcggccataatcgttgttcggcttgaccagcccgtattcaggatgcttgatgacatgcgaagagccatgccacagttcgatcgatgcggtctccattggccggctccttctctctctccttacatattcttgattatatcactgtggtgatagtcataagggaaatgcgagatgaaagataccgttgtatacgttcgtacacaacgtgaaatgtatacgaacgtatacaacactgacgtccggagtcatgctccgcagtggcgcagcgggcgcgccactacaatcggaatatgggactgaagacgtggaagaagtggacggactggccgctgatggtgctgtccgtggtgtttctggtggtgtattcgtgggaaattctctcccgcacgcatatcgcgctgtgtgaaaccgtcatcaacgtgatctgggtggtgttcgtcgtcgattatgtggtctcgctgtggttggccgacgatcgctggcggtggttcaagcacaacctgttcacgctgctgaccatcgcgctgccgatgctccggcccttgcgactgttgcgtttgctgaccgtgctgcacgtgctgaaccgcacctccggcatggcggtgcgcgggcgcatcaccgtatacgcggtcggcgcggtgggaatgctcatgtacgtgggcgcgctggccgtgtattccgtggagcgcggggcgtccggatccacgatcaccgacttcggcacggcgttgtggtgggcgttcgtgaccgtgaccaccgtgggatatggcgacttctcgccggtcaccttccaaggcaagatcattgcggtggtgctgatgttcaccggcatcgcgttgatcggtattgtgacggccacgctggcctcgtggatcgtggatcaggtcaatctggagacggatcggcgcgaggacgctcgggagaaggaagtggccaaggaagccgcgcaagaggctattgcgacatcagccaatcccgaaatcgacctattgcgcgaggaagtgcgtgagctgaccgctacggtagccggtctgcgcaccgaacttgagcgacgttgattggcgaagcgggacaaacaacgattctgccaagaaggtccgcgtcagttgttgtcaccgcggattgcggcaggatcattgtcgccacggctgttttcttcagtcggctcaacccagcttttgataatttttatttttttgatatttttgataatttttattttaggttgattcagcgaggaggcggtccacatgaaggcaaaggaaaacccattcaagccaacggcaggaggggaaccgcccctgctcatcggccgaggcaaagttatccgcgatttcgagaaaggtctcgataacggagtcggtgccccagggcgcattatgctcgtcaccggcgctcgtggaaccggaaaaaccgtgatgctcactgtgttcggagaccgggccaaagcgcgcagatgggatgtcatcgaagaaacggcctctgccggactatgcgaacgccttgttgatgccttacgaaccgggcgaggggcccttgaccacctcactatccgaccatcgttgacttttgctggagcgggcatcggcctcggagaagccgaactatccccgaagcgtatgcccgaaacgttgagaagtgccattgccggacggttggatgcgcttgagaagcgccatgctgggttgcttatcaccattgatgagactcaagcggctgagcgatccgacatgattgccatcgccactgccatacagcatcaaatcagggaacgacgcaatatcgccatcgtgttcgccggtctcccacagatgatttctgatttgttcaatgacgaagtcatcacgttcctacgtcgcgcgaaaacgaacatactcacagatattcctcttgatgaagtgcgcgatgctttcgccacaacattccgcgcctccggcatgtccatcaccgacgctcaattaagcactgcagccaatgtgacagccggatacccctatatgattcaactggttggctaccatatctgggatgccgcagacatgcgggactcggataccatcatcgacgctgatgttacggcaggtatcgaggaagcacgtattgaccttgataacgccgtgtgcatcccggagttgcaaggcttatccaaaaacgaccgtgagtatctcgaagccatggcagcgtcagatggtccctctcccaccgtgaatgttgcacagcgcatgggcaaaacgcctaactatgccgccacctaccgcaaacgcctccttgacgccttcgttatccgcgaaacagaacgaggcgaagtcgattttgccgtgcccttcctgcgcgaatacttgcgtcggaatcagtaatcggcacaatgcacagtatcgatatattccgttccatataatgacttttcgcattcagatacacaatggacggcctgttgagtagcactcagcaggccgtccattctatttagctattcagttatcggagacacacctcaggccttgaccggagcgtcagcgggagccgatgccgccgcggccagtttgcggcgcttgaggtacttcatgatggtcaggaccatgccgcggaagccccactcgccacgcaggacagtgttgagcagtccggagtgggaaccgccccactccataccgatgtagttgaaggcgctcatcacggcacccgcgccgccctgcttgacgctcatctcgaagggcttcaggtagatctcgcgaatcgactgctcgttggcccaggtggcgagctcgctcagtcggttggtctcctggtcgttcagcgcgaagtgcttcatgaaggcgtacacgcccttggcctgagcgccagcgacctgctgggaggccatcacgccgaacaggtagccgtcttcggagaagtattcgaaggtacgaccggcgaagtcgcggcattcgaatctgatatcgttatcgattcgatcagcggctcacgatactgcccttgcatcgctgtgccactgttgaatgtgcccggctggctcacctttgggtcaccgccgacacatccttgatgccgatggttatagagtcgcaaattcacgactggcgcacctgcccacgcacctatcctgtcatttcgagcgcataatttgctaccacatccggtcagggcaatcgaccttaatggcgtaaacggcacttctcaatacgtaaacggcatttattcttggctcccctctcagagaggggagccaagaaatatcaagctcggcctcccaggagagagccagaataatgcaccagcaaggcattaggatggagggcatgagcgatttgaacgcgttgaatcttgagtccggcgaagtggttggtgggtatacgctgatctcccggctcggctcaggagctatggggtcggtgtggcgggtgcgcgacgacggcggcaccacctatgccatgaagattctgcgcgactccctgaccgacgagtcagtggcaggctccggctctgcgtccacggccctgcacgaccccgacctcaagcccgatgtcacgccgcgcgagcgcctgcggcgcgaggccatggccttgaagaaggtcaatcatccgggtgtgtgcggcatcgtggatatggaactcgacgatacgttggcgttcatcgtcactgaactcatcgagggcaagaatcttaaggatgatgtggccgccaatggccggtatgtgggcgacgatctggaacgcttggcccgcaagctcatcgaagccaccaaagccgtacatgcggccggcatcgtccatcgcgacatcaaacccaccaatgtgatggtgtcggccgccggaccggtattggtcgatttcggtatcgcgatgggcgagggcgaaagtcacgtgacccgcaccggcctagtgatgggtacacccggattcatcgcacccgagattattgacggtgccgaatccgacgacgccaccgattggtggtcggtggcgtccgtgctcgcttttgccgcaaccggcgcgcctgtgttcggcaccaagccgatgatggcggtacttgagcgcgaggcctcgggcaacgcgaatctttccggactaccggccggcacattggctgccttccgttctgcactggacccggatcgcagggatcgttgcacgccggatcaattgctgaatgccatcgccttggatgcgttgaatcccaacgcttggcagggcgagcaggcgggaccgttcgccgcgggagccgtggctggacaaccggctgcgatcgttgccgaagccgcggaggcgatgcccccttttggcgcggccggcggcgttgaccgcaataatccccgaaccatctggcgcgcggccgaggaagccgctgaggctcccaccatggccgtgttctccggcaataagggcgataacggcgatggcgaaaccgtcgtattctcgccggctggcgccgctaccgccacgctgcccttagccgatatgccgccacgtccgccggccggtgcggagcaggccacgcaactgttgcccgacgctgctgccgatttcaccgacgacgccggcacacaggtactcaccggcgcgaccacaccgatgccggaccaaaccacgccgctggccgagcgcaccaccgtactccccacgccgcagccgtcatcattccccccgtccggcaccgcccagagcagctgggatcccgcaagcaaccagcccacagcggtggaccccgccattcgcccggcattgcagcgcatcatcgaccaaaccgcccaagcggcccccaccgaaaccatggtccaaaatcctcccatgcccaatccggtggacgtgaagcgaggggaatatctgcagcgcggcaccctgccattgatcctgctggcggcgccgctggcggcactggcggcaaatgctccgctcgtggccatcatcgcggccactgcgttgttgtggctactgctcaccctggcctataacaccgaaccccagcttgagcgcgagggcaaacgcggcggcgagcgcaaaaactccgattcgtggattcgcgtggcgacttttccctggcatctggtcaaagccctgctgctggccattccccgcatactgctgctagtcatcatctatatggcgggaaccgccgtggccaccgcggctctggcactgcccgttcacaccatctcctggtatttcactgcggattggggtattccggtgccgttgctcaatgatgtgccgttctccgcttccgggctggcgctgggcggtttcatggccatcggctggctggtcactgtgttcgccccacagtcgatgatgattcggctggggggcggcgtactgcgcgggctcaaacacagtcgcccggcgggcgcgccatccaccgaagtgggtggggctccacctgctccagtggcgccggcgcccaagggcggcgggcgcggcaccgtgctgttcaccatatgggccatcatcaccgtggccttgtgcgcgatgccgattctgggcatgccgatcaactggatgccgttcgcctagagcggggcggaatctcacacatcagccatccgcacacatggccgttgtgtatccgatacgttcgttccgtcacacttttacagggaattcacctcagatcagctctgggcgcagtcctcctcaggcccggtcattatgatggggcccaaacattgaagcgattgcaaggggatagctatgtcagatccgaagcgtcaggccaagcgtgccacacgcgctgagcgccgagcggccgaggaggccgcacaacaggcacgggccgagcaggcagccaaggagcgtaagcagcagaccatcaccggctgcattgtggtggccattattgtggtgctggtggccatcgctggattcgccgtatacaaggctatgcggccgtccaacaccagcagcagtagccagcaaagcaacatgaccgtggacgaggcctatagcaagctcaagaaagtcagtacccagccggctaacgccgacgacaaggccggcttcgtaatctccaacaaagggtatggccagaaagccgagggggctcccaccgtatccatctacatggaaccgctgtgccccggctgcgcctcggtgaaccgccaactcgacccgacgctcgtcaagctgatgaacgcaggccagctcaacatcgatttgcacttcctcaatttccagaacaacaagagctccgacaactactccaaccgcgtgttcaacggtgccatctacattgccgagcatgatgacgatcccgaccacctcatgagctacctctccaacatctacgctgaggatttccagccgggcgaattgtccaattacgagccggtaaacaacgccaagctggagaagcaggccgtcaaggccggcgtgagcgaggatgtggccgccgcggcgttcagcggcaagaacgaatacctcgactggctcaccgcctccaacaactacacgatcctgcgccccgaactgttcaacagctccggcgccttctcctcccccacactcaccatcaacggcgaatactgggatctgaagcagctcacgctggcggacacgaatatggtggacggcttcctcaagtccattgggctggatgctgaccaggtaggcgtggaaggcaaaatgccatccatcggtgccagcggaaagccgatttcggtcgcctcctgatgctgcgtggccgaataagttgacgccgcgacatatgcaataccgcctgcggctcggcttaaattgaccactcgggaagtaccggtatactagtcatttgttcgcaacgatttacgcgttaagaacaatcgcctctttagctcagatggccagagcggccgccttgtaagcggcaggtcgtcggttcgatcccgacaagaggctcgacgcgtagaaaagtggcgtattatatgatacgtagacttttctacgcatataattcttaccttgggtaagtactccaggagccttcccccaataatgggcttcctggaatgagggcggagcgtcccccaaccagctccgcgccttcaggggggcgggaacatccccttctctcccgccccctttttcttttctttttttgagctcagaacaatctgacgagcaggaatggtgacggtggccggtgaaaccgcagtatgggccggaacaaccgttacgatgggtggcgtaatcgttcatccagcaggaagagtatggcaatggcacggcgttggaccccgcagcggtttgttacactgcgtcgcatccgcgtaatcgcctgtatcgcggcgaccagtatcgcgctggctggatcattcgcgttcaccgcgcgtaaatccgtggccctgaacatcaacgggcaaaccacccaagtcaccacatatgcgatgacggccacccgtcttctggaggaacaaggggtggatatcaagacccacgatatcgtgaccacctcgtccggcgaccagctcgccaatcatgccgtggtcaccgtacagtccgcctaccagaccaccatcaacatcgacggcaccgccgtgccgttctggaccgtggccaccagcgccgaccagctactgggatttttcgaggaaaaccagaacaacgccgcgaagatcaccgtcgacatcaagaacgtgtacaaccagctcaccggcggcctggtgatcaaccagtccgggccggtcaccgtcatcgccgacggcaaaagctcggtggcccccaatggcaagctgccggccgcctccatcctcgattccaagggcatcgtgctcaacaaggaggatcgcgtcagcgttgagaaagacagcgacgagaccattctgcgcgtacgccgcgtgacccacggcgaggagacgcgcacgtccgtgattccgttctccacccagaccatcatcgacccgaatctggctgaagggcaggccgatgtgcgccagcagggcgtcaacggcgagaagacgcaggtgtacgacgtcacctatgtggatggcgtggccgaatcggagacgctgaaatcggagaccgtcacctcgatggccatcgaccagatcatcgccgtaggcgccgccaagtctgataccgataaaggttccgataagaaatccgactccgccgataacggcaaggccgattccggttccaacaatcagcacgagtcgtccggtaacaatgccaacaacacaggcgacaagaacaacagcagctctggcaacaacacgaataccgataccaacaacaatgccggcaacaccggcggcaacaactccggtaacaccggcaacactggtaacaccggcggcggtacgaacaacaattccggctcttccggctccgattcaggaacaacccccacgccctccggccgactctggcacgccaccgtagcccaggctcaggcctatgccgccggtgccgccgcgcagcgcgggtggacaggcaacgactgggattgcctggtcaaactatggaaccgcgagtccagatggctgtggtatgccgaaaacgcgagctccggtgcctacggcattcctcagtcgctaccagcagacaaaatggctgcgttcggcgccaattaccgtgacgatgccgccgtacagatcgattggggtctgtggtacatcgcacaagcctacggcagcccgtccaaggcatggcaaaattccgaacaaatcggttggtactgatcggttacgaagcccacaaggaacacacgcttatgaacgacaccattcccgccaccggtcacctgttaggcgccgccgatatccgtcgtatcgcggccgatgccggcatcagccccaccaagaaattcgggcagaacttcgtcatcgaccccggcacggtccgtcgtatcgtacgagaggcgggagtgactgctgccgatcatgtcatggaagtcggccccggcctgggatcgttgacattggcgattctggaaaccggcgccaccatgaccgcagtcgaaatcgatccgccgttggccgaacgactgccgggcacagtcgccgaattcatgcccgaagccacgtcacgactcaccgtcgtcaatcgggatgccttaaccgtcaccccggagaacgtgcctgatttcagcgatgacgcatcgtttacgctggtcgccaatctgccgtacaacgtggccacgccgattctgctcacgctgttggagcgtttcgacaacctcggctcgttcttggtgatggtgcaaaaagaggtggccgacagactcgccgccaagcccggttccaagatctacggcacgccgagcgtgaagctcgcctggtatggcaccgccgaacgggtgggcaccatcggccgcaatgtgttctggccggctcccaatgtggattccgcgctcgtcagattcacccggtatcaggccgatgacccggccgccccgggagcctcgaacagcaccgacggcggcgcacaacgggaactcgtatttcgtctgatcgatgcggcgttcggtcagcgtcgcaagaccctgcacgcggcattgaagaccattgcgccctccgaggcattctccatcgccggcatcgatccgacccgtcgaggagagacgctcaccatcgccgaattcaccgctctggccaaggccatcgaatcgtgtggagatggagatgaggcacaatgagtccggtaacctcacatccacgcccagccgctgcccgacatcagttcgatgagctctcccccatcaccattacggtggattgcccggctaaaaccaatctcaccttggaagtggggcctgctcacgacgagtggggcggacgccacgaactggacaccatctactgtgcaatcggcgtatacgacaccgtcaccgcaaccgccaagcaacccggagcgggattctctctggagctcgaaggcgcttatttgggcgacttggcctcctcacgcagcgacatgcgccgcaaccatgcggtactggccctcttcgccatggcccaggcggccgagcgcgagccggatgtggcgttgaccatcaccaagcgcattcccgtgggtgccggactaggcggcggttcagccgacgccgcggcgaccatgctggcggtcaatcgtctctgggagctgaactggcccatagagcgcctgcgcaccattgctgccacgttgggcgcggacatgccgttctgcctgaccggtggccttgcatacggcaccggtttcggcgaacgcatcacggatatcgcccccggcagccgcgatgagctggcgctgatagaacagggattcagcggcgaagtattggtcggcgcataccagtcgcaactcagcactcctgaggtctaccacacctttgacatcgtgggagccgcagaaggcgaccgcaatcatctgcaggctgcggcaatcagcctgcatccccgcagcgggcaggccatcgacgccgccacgcaggcgggtgccagccatgcattcgtctccggatccggcccctcagtggtcgctttcgccgccgacgaggcagcggcacaacgcattatcgaggtgtggcgcgatacagctgtggtcgatcgtattattcgagccaaatctcccgaacaccccaatatcagcgtcagacagtgacgctaaggtagcaaccagccacccgacccatgaaagaagtccaccgatgacgtatcaggttgatgaacgtgaagcccgcaaggcgtacgtgcgccgccgccagaccatcgtcttttccatcagcggcgcggtattggcagtagtgctggtcatagccctactgttcaatttccacgttttcggcctcggcgaagtggagactccggccagccagccgaattacggcaacgcggcgccgtgcgcggtcaaggacagcagcggcaaagcgcaatacgtgtccaacgcttcggtcggcattcgcgtgatgaacggcacctctcacggccaattcgccaaggccgtgggtgaagctttggccaatcgtggattcagcgtgcagaaaatcgataactattccagcaccgacgttgaacgcaccaccatctacttcggcaagaacgccattaatcaggcgtatacgctgatcggcaatttcaccgacgccaccatgatcatgacggctcgcgaggatcagctcatcgatgtggtcatcggcgccacgttcaacgatctgcaggacaccaactcctccccgcaatccggtaagaccatcaccaatatcgagggttgcaaggccgccgatagcatgaccaagctgcccgccgacaccaaacacgacgcatacacggcgcagtaaggcgcatacagcttcatcttcgcgaaaaaccgtacgctgacacgtattcagcgtacggttttttggtatcggactagtatcggactactgaatctcggcgtaccagcgcttgagttcttcgacggccacatcgtggtccaccggaccgttatccaagcggtattccagcatgtgcttgtaggcgcggccgatcatcgggccgggctccaggcccagcaactccataatttcgttgccgtccagatccgggcggatcgcgtcgaagtcctctttcttcttgagttcgcggacgcgctcctccatctcatccatggcctgggagaagatcatcgccttgcgcttgttttgtgtggtggcgtccgcgcgcgtgagcctgttcagccgctcgtacaggtgcccggcatccttgacataccggcgtacggccgagtcggtccacggctcgtccacatagccgtggaagcgcaggtgcatattcaccagttccgagacgtcctcgaccagatggtggtcaaaacgcagcgccttcaaacgcttgcgggtcattttggcacccaccgcgtcatggtggtggaagctcactttgccgcccggctcgaaccggcgggtcttcggcttgccgatatcgtgcatcacggcggccaagcgcagcgtcaggtcgggggcgggcaccgggccgtccgggccggtttccagggcgatcgcgcgttcgagcacaatcatcgtgtgctcgaagacgtccttgtggcggtggtgttcgtcgatctgcaattgcagggccggaatctccgggaagacgatgtccgcaagaccggattcgaccaacgcctcaaggccggcgcgcggacggtcggagagcagcagcttggtcagttcgtcgcgcacgcgctcggcggatacgatgtcgatgcggtcgcgcatcgaggtaatcgcctcggccgcgtccggcgcgatacggaagcccagctgggccacgaatcgcacggcgcgcatcatacgcaacggatcgtcgtcaaaggactgtcgcgggtccaccggcgtgcgcaacacgcccttggacagatcactggcaccaccgaacgggtccacgaattgcaggtcgggcacgcgcagagccatcgcgttgacggtgaagtcgcggcgggacaggtcgccctcaagcgtgtcgccataattgacctcgggcttacgcgagtccggatcgtacgtgtcagagcgataggtggtgacctccaccttgacctcggtgccgtccgggcggcggcgcatggcacccagcgtgccgaacttgcgccccatgtcccagaagccgtcatgcccccaccggcgcagtatcggctcgaactgctcaggccgtgcggatgagcagaagtccaaatcgtggctctttctatggagcagcaaatccctgaccgggccgccgaccaatgccagctcgtaaccctgttcggcgaacagtcgaccaagttcgatggcttcgggccatacttcgaaatccaatgggcaccttcccgcgtgcgacgtttttctgccctaccagcataccgttaccccacctgcacacggggttgagtaaggtggagaatatgattacgcccgccgaccttgcccgcatgctggggcaaacaccagattcggcggatagccatacccaagaccacctgctgtatacgtccgaaactccgcatcattccgccgattcgggcgattcttccgatgtcggcggcaccgcgagccactccaccaatcaggccgttcatcaagacgaagtagacgcagtaccgactgcgcaacattccggtgtgcctggcacacccgcaacgcccgccacacctgaaccatccgaatccgaaatatcggacgccgccagcgacatgcccgcaccgaagccgatgatgcccacaccggccaccgtcttcggcatgcatgccaccgtcaccatcgccactaccagcggcactatcgaggggcaggctgatggtatcgccggcgaggccggtgccgagacgattgccgaggtcgagccgattatcgccacggcacaaacgtccgtaaccatcgtcacgaacgatcccgcggcgaccgctcacgcggccgtagatgctgccgttgcggtcgccaaggccgccgccgcgcacaccacagcgataccgactccgcgcgacgtgctgatgccgcctgcggcacgtaccgcaccggccgcaacgccggtcaccatgccggtctcagcgccgtctgcagcaccagtgaggcccgcaacgtcagcgcatcccacgccggccacggtcttcggccggcacccgtccggagatgttgcctcgccggaaccggcagtgccggtagaaccggtgacgccatccggcccgactccggccatgatgccgcaacgccgtacgtcggacggtccgaccacattcgcttcactggatgcccaggaactgccggtcgtacgcgaatattcggcaggcggtctgattttcgatgaccagaaccgcgtggccattatcgcccgtcattcccgctccggccatctcgaatggtgcttgccgaaggggcatatcgaaaaaggcgagaccccgcagcagaccgctgtgcgcgaagtgcatgaagagaccggcatcctgggcgaggtgatcgattccatcgccaccatcgactactggttcaccggtaccacgcagcgcgtgcacaagctggtccatcacttcgcgctcaaacagaccggcggtgaactgacggtggaaggagacccggatcatgaggcggaagacgccatctgggtgcgttttgaagatttggatgacgtgttgagctatcccaacgaacgcaaaatcgcgtggctctacgccaggaagaagaacaggcaggcaaacgagtgaacctacccggagtcttacgacattgcacacgtctggcacacgcactggcggctggcgtcgccgttgtggcgatgctggccgctccattgaccgtctacgcgaacgatacgacggacacgactgattcatccgatacgacggacgcaacgggcaatcagaccgagaatcagcccaagcagagcattgccatcacgcaaagcacccccatcgtcacctccaaatcgggctatcgtgtcaccgcggtcatcagcaatacggacagcacggccacgtcaagcggcacactgcacctgaccaccaatgcgttgttcacctttgtctcgcgcaccgatattcagaattgggccgagaacaacgcccccatcccaacccccaacgagttgggttccgttgacgtgccatcgattcccgccggcggcactgccaccgtcaccatcgaggtgaacgccaatcagcagacccttgcctccatagggagttggggaccgaaaccgctgatgctgtcgtatatcgttggcaatcagatactcgccgatttgccgagttttctgacccgatcttcggatgggctcaacaccgcgacaacaccggccatgaacctgaccgtggccatgccctacaccgccagcggctggcaggtcgataataaggccatcagcaatcgcattgccgaaaccaccacttcctcgacatcaacatcgtccaagtccaacagcacggacaaggccgacaagtccgataacgccgacgccagcaacgcggccaaagccactgatacgcaagccatatccttatccgaacaggatgccgataccgcgcgatcccttgggcagacattcgccaagcaccgctcgctgcaagtgatcgcggatcctctgtattggcgtcagtccgcagtgcaaccgtccattgccggcatcctgcagcccgccgacttcgacatcaccgcctataccgcactggacgataccgcggcctacgaaaaggccggcatcaccactgagcagtggaacgccaagcaggcggccgcatggtatgccgacggaggcgactccgaaacaccctccgcgtacgcatggcagggcaacaactgttggacgttggatgcgctgaccgcagcacgcgagcagggctatgacacggtgattgccgatgcctctttcgatgccgaccagactgaagccgtacacacaggcacctacgtggtgcatacgcctgccggcgatgtcaccgtgctgaaggagcaatcgaccttgggcacgctggccaagggccaagccaccagcacggacgcgcaggccgagtccagcgatgccggtcggttggcccgactggtcgctcagagcgcgttctaccagatggaacagccctatacatcccgatacctgcttatgacgttctcccgcaccacggaggccagctggatcgatcaggtgatgagcgccttcgagcaggcgtcttggttgaatctgacggacctgaagaccatggccaaggccgatccgtacaatgtcagcgattcggtcaatcccgacaaggccgatgatgccaacaccgccaatacccggtcggcattgagacagttggccgacagccggcatgacatcatgcgcatggccacctccatattgaggaacgagattgattccgacgaggtctcgtcgttggacccgcaggccctggcccggcaggacgccaatgacaccgcctcgcatagcaacgatccgacgcaatggattggctctttactggcgctgcatgacgatatggcgctgcggtccatgtctggctccccccagccgacagccacgcgaaaagccatggtcaaagccacgaaaacactggccagcgatcttctgaacggcgtacgtatcaacccatcggaatcaatatccgtgttcagcgaatccgcgaaaatgccaatcaccgtcagcaatgaccttccctacgccgtcagcgtgcaggtcaactcactgactgactccatgcagatcgtcacctcgcgaaccgctgacatcgatattccctcgcatagcgacgctcaggtgaccttcaccatccgcgtttccacttccggctcatcgacggcccatgtgtcgttgaccgaccgggaaggcaacagcttcggcaacacgcaggacaccgcgatcaccagtgtgatgcgcatcagtgatgccagcggcttcattatcatcggcttcgccgtgctactgggcattatcggcctgtggcggcagttccatcggaagaaggaccccgacgaatgagttcaagcgtaggtcgtaattccctgatcatggccacgggaaccgctgcttcccgtgtgaccggtcagctccgcacgattcttctcgctgcggccatcggcaccaccggattggcggccaacgcctatcaggccggttccatgattccccaatccgtgttcacgctggtgtccggcggcatcttcaacgccgtgctggtgccccagatcgtgcgcacgttgaaagaaaaagacgcccaagaacgactgaatcgcctgattacgttggccatcggcatcctattggccatgaccgtggtgatggcggcggccagccctctgcttgcccgcctgtacgtgggtagcgacgatcaccagatgatagccctgaccacctcgttcaccctgtggtgcatgcctcaggtgttcttctacggcctgtatacggtattgggtcagatcctggccgccaaagaccatttcctcacgtatgcgtggagctcaaccggtgccaacattattagttgcgccggttttactggctttattctgctgttcagcaaggccaatgaacagcccctcgaattctggaccgccgacaaaatcgcgcttaccgcaggcacctggactttgggcgtggccttccaagcgctgatactgttcctgccgctggcccgtatcgggttcaagtacaaacccagcttcgggcttggcggctttggactcaggtctatgggtcccgtggcgttaggctctttgggcgtggtgatcaccagtgagatctgcggcattatccttacccgtatcgccacatccgcaccgcagcgcgcccacgaactgacgggtgccagcctgttcagcgtggcaggcaacgcgacctatcagaatgcgtacacactgttcatcctgccctattcactcatcgccgtatcggtatccacggctatgttccccaaaatctcccgttccatcgcagctgcgaatctggatgaggcacggcacgacctggtcagcgcactgaataatgtgggcctgctcatcatgttcttcgccgccgccatggtcgtgttccccgaaccgatcatccgtgcattgcttccgtccgtctcgatggacgagactatgttgatctcctatgcgcttatcgccttgtctgtgggcattccattggggtcggcgttcctgttaatccagcgcacgttctacgcctttgaggacggccttcaccccttcctgtccgcggtgatgcagtatggattcacctcaatattcatgatcatcggcatgatggtacttcctcctgagcattgggtactcggcatcgcctgctcggtgaccctcggtggattactggcgttgccgctgacgttgatgatgttgcgccgcaagttcgaaggcaatcttggcggtcgggagatcacgaggacatatgccaaggccattgtggcggcactggcttccggagttgtggtctggctgatcaaacgaccggtagtcgcactgctcggcgcggatattcgaccagtaggcgggcacatgagctggtggtctgcgctggtcatctgcgtggtgctcaccattgtgctggccgtagtatatgtggctgtgttgtgggtggtacacaccccggaactcatcagcgcctatcactcgatactggcccgtctacacaagactccggccagtgaggacgttgctgtgacagcccagccggaaaaaagtcgacgctacgtaaatcaatcctgagacggagcccgtcaaggatagccccgcacgtagaatatctaagaccaatctcgaacaccaatcacacggagccgaacgcactatgaaaccgcaactcggagacacgattctcaaccgatataccttggtatcatcgttgcgtgaggagcctggcattcaggcatggaaagccaacgaccgtgtgctggcaaaggattgccagctgttcatcattaccgatcgcagcgctttcgccgcaatcgatgagctcgctggtcgcatcgccgccactcgccctgatcgtgtgattcccatactgaaataccgtatggaatccgacgtacttctcattgtcatgccggtggatagcggccaatgcctgactgactacatggtagataccgccaagccgctcagctacagcgccatccggtcgattatcggagaatgcgccgacgtgctgcgcgaggtcattgcggatactcccagcggcatcgtcatcacaaccgacaccgttcgagtgactacctccggtgtgcaaattgccgatgcaccatgtgccacgatgctggccgatacgtccgctaccgatctgcgtacggacggtcctgaacggtatgcgattcgccagcttgcggcattactctataccctgctgacacgcacgccaagccaagcgacacccacattcaatctgcgtgccttgccgcaagacacccctggcgaattccgcgtgatttgcaagcgtggattggccttgagcgagcccgacgagcatacgttgccaatggcagcccttgtagaactcgacgccttgttgggtaattggaagccgctctctgaactgagcgatgctgatatcgctttgccgagcgtggaaagcgattgctcgattaccaaggcgatactgaagcctgccaacgagactgatatcgtgcctattcccagcacgttgattaacagcaacagtcttccggaattgtctattaccccttccctgccgattcagccggccgccgtccccgctccgcacgcgatgtcaccggttcctctgcctgatgggtccagtactgctgacggcaaccagtctcagtctgatgcccgccgtctgtttgacttcaacctttctgacgcctgggagcacgaaaatctttccggtgaaggcaccggtgactggtacagcgaaatgaatccggcccccatcggcggtccgggtgataatactcggttgacagtgcctattgttaccggcggtatttccgatgccaccgtgggagagacaaccagtcgtattcccgtgttcgacgccagcggccgtgctgtggctcccggtgaggaatcactgcgtgccttggaagaggagcaggcccgcattgccgaagtaagcgccattcctccgagcttcacaccgaaggatgtgccggatgacgaggttgacagcaagctgcccgatgaacatctgttcggcaaactgtcgaccaaggtcgttgccatcattgtggctctgatattggtagtggcagcggctgtttgggcagtgcatgcgttccagtcctccggagacaatcctgccgatgcttccatcaactccagtgaaggtgactggcctgatatcaatgctgacgctgtgccatttggtggcagcgagaacgcgacgaacggtggcaccactgacgattcttcaaagtcgagtgatgacactcagagcgaatccaaggactcggtatcagacaagtccaagaagtccgagactgctgattcgtcgtccaagaagtccggcgataaggattccagcgctgttccgcaaccgagccatgagaacaacacggcgtttacgatttccagcgccaacttcctgtcgaatcctggcggccaatccgggtacgcatactacatgcaccttgaccagccgcaggatgcgtaccgcatggttatcaccatccgcacatccggcggtaagggctatattcgcgcaaataccactggagaccccactcagggcaagcaggtggccgaattcacctttgctgaaggtggcactactgaggtgaagttcaccaaagccgtcaagacgcaggatctgctgctgtgggtgccatcggatagcctgccgcagaaccagctgtacatcgaaaaggtggaggtcttctaatcggcatctatgccgataactgacccaagaaggggtggtaccgttcgcatacattcgacggtaccgccccttcttcgcatctggctgaatgacacggaatatcgtatgggggtgtgacaatgtttcacgtgaaacataacgtcatcattatcggttctggtcccgctggctacacggccgccatctatcttggccgcgcaggtctcaatcctgttatggtcactggtgcgttgtcgccaggtggacagttggtcaacaccactgaggtggagaacttccccggattcccggaaggtattcttggcccggatcttatggatcgcatgaaggaacaggccaagcgcttcggtacaacctatatcgcagacgatgtctcttccatcgaggcgtgtgagagtgattcggtcaagccgacctatcgtgtaacactctccgatgactcccagttggaggcatcgtcgcttatcatcgccacagggtcgtcattccgtaagcttggggtgcccggcgaacaggagctgtccggacatggcatctcgtactgcgccacctgcgatggcttcttcttcaggaacaagcctatcgtggtcgtaggcggtggcgattcggcttttgaagaggcattattcctgacccggttcggttcttcggtcaccttgattcaccgacgcgatagcttccgcgcctcgcagatcatggtggaccgagccaaagccaatccgaccatcactctgatgaccaacacagtggtgacctccattaccggcacctcctcccccacacagaacaccggtgcacctattgccattcctggcttgacgctcaaacgaccggctgtagcaccggccagtgtcagcagcatcgccgtacgtaacgtggtgaccggagaagaaagcacgctggacaccaacgccgtattcgtggctatcggccatacgccagccactgattttgcggccggtgttgtggaccgtgacgatgatgggtatgtcgtggtgcagggtgccagcacggtcaccagtgcgccaggcatctttgctgcaggcgattgcgtggatcgtacttatcgtcaggcgatcagcgcagcgggcatgggctgccgtgcagcgctggatgcgcaggcttatcttacggactgatggtggcggactgatggtggcggactgatggtggcggactgatggtggcttgctgttctggctactgcctgtgacataggagcaacgctaggtcagtgttacagcatgccgcccttggatagtacgtatcggtcaaaggcatagaaagacccctcaggcgacggagaggttgtgcccgatgttttgcgcaaatgtggcctggtccgtcgtcgggggaatgacttcagtcagttgattgcatgatgccgtcgagccgggacatgtccaggtagcggcggctcgaccaatcgttggcggtgacgtagcggatcctggcgcagatgagcatgagcgcgctcctgccatccgggaagctgccgacgacgcgggtgcggcggcggatctcccggttcaatcgttcgatcatgttgttcgtgcggatccgccgccggtgctccgggggatactcgtcgagcagataggtcgtggtctcgccgataccttccctcaggcaggaggccgccgctttcagtctcctggactccatctcgcgggcgacctcctcggccttggcgagggcggacgcgcgtgattccatggcgaagatcgccttgagcgcggcggacgcccattcgcggtgggtgggcggcaccttggagagcacgttgcgcatgaagtggaccatgcaccgctggtatctggcctgcggcagcatctcgccgacggtggcgacgagcccggcgcacctgtcgccgaccacgagcctgacgcccttcaggccgcgctcgatcatggaccgtatgaactgctcccagctggccttgtcctccttcatgccctcggccacgccgatgacctcccggtggcccgtgtcgtccacgccgatggcgaccagcacgctcacgttctcgaccgacccgccccatgagcgcttgtgccacacaccgtccatgaacacgtacgggtactcgcccccaagcggccggttgcgccattcgtcgatctggtcgtacaccttcctgagcttgtcggagagcgtctgcgagggcatccgctcgccccacagcaggcggctgatgtcgtcgacctgacgcgtgctgacgccggccaggtacatgtcgatcagcgcctcctcgacgctctgctcgcgacgccggtagcgttcgatgaccgccgactcgaagaccgcgcccttcagcttgggcaccttgagtccgagcctgccggccttgacggtgaacctgcgcgcgtagtggccggcccggtacgccttgcgtccatcgcttctctcgtatctggcggcgttggcgattaggtcggcctcctcgtcgagcatcgcgttgacgatctgctcgaccttgtcgcgcaccatggcgtcgagcttggtctcgaacatggcctggtcgaactgtatgatttccttggacatggcccgtgcctctttccaatcgcggttttcctgtgttagcgactgaaaatcgtacccggtgcgggccatgttcatatccgggaagcccgaatcacaaagtgcgcaaaaaccgggcgttatctctcgtcgcccgcgacagcttcaccccgcaagactgaaaacaaaaattcgagatacagcaaggaccggcatcctgttacgaagccggtcctgcaattacgtttcagcaatcgcgccttaacgaagaaggtgggcgtcgcaccagacgtgttcgacggcccagatggcggggttgatcagaagcacgtcggcagcgtagccgggggcaagcagaccgagcggctgcttggtgaccgggttcgcacgatcgaaaccgaatgctttggccggaatcaacgtggcggcttccaccgcgtcggtaggcgtgaatcctaattcgagtaccgcacgctgaacagccttttccaacgtcaacgtggaaccggctatcgcaccattcgatgcaagacgagcatgaccgtcaatcacattcacatccaacgcacccagcaaataatgaccatccgggcaatcggtggcagccatagcgtcggtcacaaacgcaatgcgatgcggagcgaagccgaatcccaaacgcaccatcggatcctgcacatgaaaaccatcattaatcaactcaacagtgacgcgcggatcctcaacagcagccggaatcggaccaggctcacgatgatgcaaaccattcatcgcattgaacatgtgcgtcataatgccagcacccgcatcaaaacctctgcaggcggttgcataatcggcatcgcaatgtcccaccgcaggaaccactccagccgcagcaaaacgacgaatcgcatcaatgccatgcggtagttcgggggcgatggtgatctgtcgcaaacagccgttcgcagcatgcaaaagccgatcaacatattcgggaaccggatctttcaagcattccggatcatgcgcacctttgcgagacaacgcaaggaacggaccctccaaatgcgctccaagaatgtcagggcgagcacccatcatgccacgcacggtttgaagattggcgcacatcacgtcaagcgggttggtgatcaaactgagcacctgacgggtggtgccgtgcatcatatgacctgcgcgagccatgcgtatgccttgcacaccatcatcgaaggaactcccccacgaaccgtgcgcatgaatgtcgacgtaaccgggagtcatcatgcggcctgcagcgttggtcacgaaaccggccgaaccggtcatggaatcgccgaaaccaaccgaactgaccgaatcggaatcagcatcggcatccaaaccgacgcttgcgcatgccgcagcaaaatcatcgtcccgattcccagtcgcaataatcgcgctaccatcggaaaccagccaataatgttccgcaacacctcgcgcatcgactttgcgcgcattgtgaatcgcaaacggacgggccgactgcgctaacgcaacgtccacctcattcgcaaaccgctcccgagactgttccatattcaaaccttccgactcactcacagccatattcctcaattagcatccaattcttccagcgagtggaggaatcctcccgctgacaggccaaaaacgtccagaatgttccagcagttcgttcggcacggaggtttgcgcgtatacgcgacccaggaagaagccgaatggcgaaacgcaacacgggatgatgaatacgatggcgaacagtatgccgaatggtgccatgaacgcccatcctgttcgatcctcgcggcgttgcgcttcagtgcgctttttgccatagaagagcctacgtaccatctacgtagccataacgtctcggaaccactttcgcgacccatatgacaattgaacgtcaaacaacaacatgacgcttatccgcagcacggaacaacgaaaaacctctcaccagaatcatgcgaggctgcaccttttaagatttgccgttaagttagtagctaagtaaattagatggccctgcaccagccagtgttctccagttcacatttgacggacatcgacttccccattaagagacgccactctgggagatagacacgcccctgacattgacttcatgtccacactcaaccagggtaaggtcgagcgtgaacatgaagtcagcttgagtcgattagagctgaatcacgactccctcccaacgagcaagctcgccgcgagcgatcgacttcacgccatgtacggcatcataggtgctgagcagcacctgcgactcgctcacgccattcccgagcaatcgcgcgacctccgccggcacccgcgccgtcctaccggtgagattgaccatgacgagaatcgtatcgtcgccgccggtacgggtgaacgaatacacctgctcgctgtctgccgcgaccagattccactcgcccgtcgcgacggtcgcgttgccgtggcgcatggcgatgagcttcttgtagaagccgtacacggaatcaggatcgtcgaactcctcggccgcgttgatctccacatggttcggattcacgccgatccacggttccgtcgccgcgtcggccgcggtgaagccggcgtacctggaagcgtcccactgcatcggcgtgcgcgaattgtcccgtccgatgagcgcgagggccgccatcatcgattccggcgactggcacctggcctcctccacgcgctggcggtaggcgttgatggcctccagatcgcggtactggtcgagcttggtgaaatgggcgttggtcatgcccagctcctcgccctcataaatgtagggggtgccacggtgcatgtgcagcagcatgccgaacgccttggcgctcaactcgcgcgactcgcggtcagagtcgtcgccccaacgggacacgacacgcggctggtcgtggttgcagaagaacaggctggcccagccggcgttcctcacggcctcctgctggtcggcaagacgagcacgcagattcctgacttcgaacggcacggtgttccacttggaaccttcctggtcgacgcccacgtggtcgaacaggaacagcatgtcgagttccttgtgggccggattggtgatgaactcgttgcgttccggagtgatgcccggcgcctcgccgacgttcatgtagccttcgcggccctcgaacacctcgcggcgcatttcggcgaggaactcgtcgagccgcggaccatcggaacagaacgggctcgcgttcgtgtatccctcttcgcctatctctccttcggataattccgagtcgacctctccaggcagccgtccgtggctatcgagatgtttcgagatcaaggtgatcacgtccatgcggaagccgtcgatgccgcgatccatccaccaattcatcatcctgtacacggccttgcgcacctccggattctcccagttgagatccggctgcttcctggagaactggtggaggtagtattcgccgcgcttcggatcgtactgccaagcggaaccgccgaaatacgaaccccaccggttcggctcggcacccggagtgcccggctcatgccccggcctggccggacgccaccaataccagtcggcatgcggatcgtccttgtcgcgggaagcctggaaccaggcatgctcgtcggacgtgtggttgaccaccagatccatcacgatcttcagaccgcgcctgtgcgcttcggcaagcagctcgtccatatcctccaaggtgccgaacagcggatcgatatcctgatagtcggaaatatcgtagccgttgtcatcctgcggcgacctgtagaccggggacagccacagcacgtccacgccgaggtcggcgaggtagtcgagacggctggtgatgcccttcaggtcgccgacgccgtcgccgttcgtgtcctggaaggaacgcgggtagatctggtagaccaccgcgttggcccaccacgggttcggggtcgcgccgttggaacgcacggcgtcgggaagggtggaacgattgaaatcagtcatatcttgtttccttattaaatcaagttcttcatcaacgcgatgctatggatccacgttgcctatatacgggatgaatcaatgttgctttttcctttccctttagagttccatccatgagccgaacaagcatgctcatgcccagttgacacaactctgctggcattaagggaaattcatctatcctcagacgcttgcctatggaatctgtatatgttcccgctgaaatcagcgaaagatcttgaggaatcttcattccacgctgccgcgtcgcagcaacaagattattaaggaacaatgggccgccttgagtcacaattgctgtgttctcactcgagatgaacctctcaagtaggttttcggcagcatcgaaatcatcctcgtcggtaaactcttcatctatatgaatcttgtatcgcgcagcagcatcatgcattgatgtcctgagtcgaatgagataatttgcacctccatttcgttcgtaatcaatctccttcccccctgcaaacagaattctgctgtgcccattacgacaaagcgtttgcatgatcatttcacccatttcaataaaatcggtatcaatgcatggcacagttatttcattcataggatgtccaatagaaatgaccggaatacttgaaagctgagctaattcaattcggggatcattcatagtcacatccataagagcgacaccatccaccatcccagtatcgatgatagagcgaagctgctcatctcctgtttcctcagtcaacagcaacgtttcatagccaagttgcctggccgctttgagaaaatttagaaaataagcacaataattggtatagctggtggaatcatggacgggcgaactcagcgcgacgaaatgagtctcaccactcaacggagctggaccaccgtttttcgccaagtaaccaagttcccgcgcagctcgcaatactctccgacgggtatttgcccctatgggacgtttccctgtcatcacataggaaaccgtgcttatggaaactcctgcgagagccgccacgtccttgattccagccattgttatccttattcgttcacagtaaagccttggctctttccttgctcaacgagcttgtcctgccaagccttcacaccttccttcattgtggtctgtcccgtgtaagccgccccgacagtgtcggtgaaaacgcttcgcgcataaacgtcatagggcagaaattcgaacttagatgtgacacgcttcgcagcctcggcgaattcagcattgaacttctcaccgccaaaataatccaccgtgtctccatcggagttcaccatagtagtctggctaaggaatttatcgttagacatggtcttcaaatcagcaggaaaaccaccttggtccacacgggacatgatggcatcagaattagtgctggcaaattccataaacttgtacgcagcatccgcattcttggatgacgacatcagggcaagggaggagccgccgtactcagaacttaccttctcgccgacgttccacgttggcatttgagcaattcgccactttccagcaccctccgaagcattgtttaaaaacatgccgggagcccatgcagcagatatcacgctcgcaaattctccggaaccaactgaacgataccaatcatcagaactatcttttgtcttcgtttcgattagtccttcatcaatcatcttttgccagaagtcacagaatttctgcactcctttatcagtagtgagtttgacggtaaccttagtgccgtctttagatgtggaatatgggtgtccacctgcttgccagaccattgcattgaagaatccggcgttccctggatcattagtaatatatgaaccaatctgcttaatcttctttgcatcttgatagaactcatcccaagtacttggcggctcagaaatgccagctttgtcaaatacctctttgtcatagtaaaaagccattggtccagagtcgactggcataccatacataccgccattgaaattcactgcattccaagtacctggggtgtagaaatccttatatttggcagtcccatagtcattcagatttttaagagagcccttaattgcatactcaggaatcgcataatattcaatcatggctatatccggaattccactgccagcttccaaagcattattcagagctttgtattcatctttaccactaccggcattggtaaatttgatgacaatgttagggtttttcttcatgaaaaccttagcattagctttaagattgttatcccaagcccaaacattaacaaccgtcttaccgctcccatcgggagtttccgactgagttgttccacacgctgccaatggaacaaccatcgccgcagcaccgcagagagcaattatttttcctaatgagaacctcattgtttccctttctttctattgagcagcagtggcatgatccttgcttttggcgcccttgcttgtagtctgcatcttaaaaccgaaggattatgactgacaaataatttcgatgatttcgacgatttcaataatcaaggcactcaccataacagacacgcgcggctgcatcacgcaacggccaacacaattgatgatccattgtctaaagaacgagaaagtcacattagcgaatatagtgctgtcccaaggaatgtgccgcgtctaaaaacacatacatcgtcatatgatcggacacttcaacgctttactaagaagtcaacacagaccggaaaaacctataacgtaaatcaacagcgatgtcgccaataacagctctgctatatatttctatcaacaaattgcctggaatatgtgccaaattgcaaccccggcggttcggctatcatgcgctgaaccatcaacttcgtaggccctcacacgatacaatcgcgcgtgcctgttctggtgagtgccttgattattgaaatcgtcgaaatcatcgaaattatttgtcagtcataatccttcggttttaagatgcagactacaagcaagggcgccaaaagcaaggatcatgccactgccgttcaatagaaagaaaggaaaaagaataccatcgggtgtcctcgaaggcatgaaccgtaccgcccgatcatcgaaatctgaatttcttcagtccaacgatcggggtgcgattcatcaaggctccaccgtggagtgaaagtacaggcgcgaaagggatgctttcccatccacacctgtttcacactcggaaatctttgcgcggcaatcaaaaacaatcaaaaaatgtctcgaaggagagaatgatgtcagcaacggaagttgttgccaatatgccactgcattcggcaaccgtgcgtgtcaataaacacaaggcggattggcgtggttggaagtttatgtggccgttcgcgttggtgttcgtgttcgtgttcgtgatcccgatcctgtacgcggtctacatcagcttcttccagaagcagatgatcggcggcacgaagttcgtgggaatcagcaactacattcgtctgttccacgaccagcagttctggagttcggtatggcgcgtggccctgttcactatggtgcaggttcccatcatgctgttcctgtcggcggcgatggctttggctttggattccatgaagctgcatggcgcgaagttcttccgcatcagcacgttcctgccgtacgcggtgccggccgtggtgtcgactttggtgtggggcttcatgtacggcgcgaaatacggtctggtcggctccctgaacgactggctgggcacgaacctcgacgtgctgagcccaagcgtgctgctcgcttcgatcggcaacatcgtgacctgggagttcacgggctacaacatgctgatcttctacagctcgctgtccacgatcccgcactcgctgtacgaggccgccagcattgacggcgcgagcgaatggcagatcatcaagtccatcaagctgcccgaactgaagggatcgctcgcgatcacggtgatcttctcgatcatcggctcgttccagctgttcaacgagccgagcatcctgcagaacatggtgcctggcaactcgatcaccacgtattacacgccgaacatgtacgcgtacaacctgagcttcgcgggcaaccagtcgaactacgccgccgccttggcgatcacgatggccgtgatcacgatggcgatcgcgtacgcggtgcagctcaacagcatgaaggagcagatgaagtaacgccttggggcgtacgtcatctgcataggacacggatttttcaaggagcataacaatcatgagcgatactgcgatgtcgacggggtatatgactccccaagagcttaaagagcaggaacgagccgcaaggaaggccgagagggcacgcttgaagcgcgtggaaatggatgagaaggcggagcgcagacgcgcggcgaagtccggtttcgcgaacgtgtcgaacccgaggcgcagcaagctgctgaccttggtatgcgcgatcttcgcggtgtactgcctgttcccgttcgtgtacctgctggtcaacgccacgaagacgcaggccgacttcacgtccacgttcggcctgggcttcggccacacgttcgccctgtgggacaacatcgtgaccgtgttcacctaccaggatggcatcttcgggcgctggctgctcaacacgctcctgtacgtggtcgtgggcgcgggcggcgcgaccctgctggccatcatgggcggctacgcgctggcgaagttccgtttcccgggacgcaaggccgtgttcgcggtcatcatcggcgcgatcagcgtgccgggcatcgcgttggcggtcccgcagttcctgctgttcgccaagctcagcctgacgaacacgccgtgggccatgatcattccatcgttgatcagcccgtttggtttgtatctgatgtggatcttctccgagcaggcggttccgacggaattgcttgaagccgcacgagtcgatggggcttcggagctccgcacgttcttccaggtgtccctgccgctgctcgccccgggcatcgttacgacggccctgttcacgatcgtggcgacgtggaacaactacttcctgccgttgatcatgttgaaaaattcgaactggtatccgctcacgatcggcctgaaccagtggaaggaccaggcgagcaccgctggcggccaggcgatccagaatctggtgatcacgggctcgttgatcacgatcgtcccgctggtcatcgcgttcctgtgcctgcagaagtactggcagtccggcctctccgcgggtgcggtcaaggaataatccatttctacgccacagccatggaacgaaaagtatggcccgtactacaagtacgggccatacgcatatacatgatctggcggaccttcctcacaaatcgcgatagttgttccccattgtgagacgcacttcggctgcaaagctgaagtaattcagatccatatggccgaaggtacggtctggttgtgcccgaagtcttgcgcaaaagcggtctggcccgttgccgggtcggtttcagtcggttgtctgcatggtgtcaccgagtcgggacatgtccaggtagcggcggctcgaccaatcgttggcggtgacgtatcggatcctggcgcagacgagcatgagcgcgctcctgccgtcggggaagctgccgacgaccctgatacgccggcggatctccctgttgaggcgttcgatcatgttgttcgtgcggatccgccgacggtgctcgacggggtagtcgtcgagcaggtaggtggtcgactcgcctatgccctccctgaggcaggatgcggcggccttcaatccgcgggattccatctgcgcggccacatcctccgccttcctcaacgcggcgtcgcgggattccatggcgaacacggccttgagcgcgccggccgcccatgccgcgtgtttgcggctgaccctggagagcacgttgcgcatgaaatgcaccacgcaccgctggtatctggcgtccggcagcatcgcgttgaccgtggacaccagtcccgcgcaccggtcgccgaccaccaggcgcacgcccttcagaccgcgttcgatcaggctcctgaggaagccctcccagctggccctgtcctccttcatgccctccgcgacgccgacgacctcccgatggcccgtgtcgtccacgccgatcgcgaccagcacgctcacgttctcgaccgacccgccccacgtgcgcttgtgccacacgccgtccacgaacaggtacgggtacgaacgctccaacggcctgttgcgccattcgtcgatctgcgcgtacacccccttgagcttgtccgagagcgtctgcgagggcatccgctcgccccacagcaggcggctgatgtcgtcgacctgacgggtcgaaacgccggccaggtacatgtcgatcagcgcctcctcgacgctctgctcacgacgcctgtatcgttcgatcaccgccgactcgaacagcgcgcccttgagcttcgggaccttgagggtcacagtcccggccttcacggtcaggtcacgctcgtaatgacccactctgtaggccttcctgtccccggtgcgctcgtagcgggcggcgcccgtgatctcgtccgcctccgcgtccagcatcgcgttcagcaattgctcgaccttctccgacaccaaccggtcgagtctcgtctcgagcatgttctcatcgacctgtagaatctgatcctgcatggttccgtcgcctctttccatagcggttttgtttggcgactgaaatcgtacccagacgacgggccatgcctcttcattcaggcttcaaccaaagtgcgcaacaaaccgggcgttatcgacggagaatcacgatgtgtgatttgtcatcctccagcctgaggggttttctattgcgacaggggccacaacgcaggcatacgcccctgccaggaatcacgcagaggctataacgtcttgcgcgtacaacgcactgcacagcaataatgccggcgacaacacgaatgttcttatcgtgttacacccatttggaatcggcatcgccttggctcggcaccagcagctgcaggatgcgatccatatcctctggtgacgagaagacgatttcgatgcgaccatgcttggtgctgcccttaatcgacaccttggtgtcgaaatgattttccaaactctgctggatggcggaaccaacccaaggattggtcttggacgtcttgggcttcttcggctgctcccccgacgcaatcttcatggcgacgatttcttcagtgctgcgtacagaaagaccttccgcaataatacgagaagccagcttgtccatttcctccggatcgctcaggcccaatagcgcacgcgcatgaccggacgatagcacaccggcagccactctcttttgcacagaggccggcaggttcagcagtcgcaaggtattggcgatttgcgggcgagacttggacaccgacttggacagttgtacttgtgtcaacccgaactcttcaatcatctgctggtaggcagccgcctcttccagcggattcaaggccacacggtgcaagttttccagcaatgcatcgcggagcatatcatcatccgcagtggttttgacgatggcgggaatcgtctccaacccagccaactgagaagcacgccaacggcgttcacccataatgagctcatacgggctgtccaaatgaccggcaaacggattcgtgctggattccgtctcgtcgtgcttggcggctttggccgcaacaatctggcttgccggacgcttgcgcacgactatcggttgcagcacaccaacttccttaatggaagcagacagctcattcaactcatcctcgtcgaagatggtacgaggctgatgtgcattgggcccgatatcagacagtttgagttcagccagataaccaccggctaccggcttgagctcgtccttcttatctgtgtcagcggtctttgccgccgtcactgtcaaagatgtttcacgtgaaacatctttgacagtgacggatgtacgatgtgccgtctgagacgcagacgacttgccgccctgctgaggtgcggcgaccttaccggtttgaggtttctccgtaccgaaaaacaggtcgctaggatgagtaatagtgtccaatgcgggcatggatgcgcgtttaccggcggctttcttgactgccttgctggacgatatcgtctgaggcacggcaggctttgattcctgctgggcagtagccttcttggcgggggttatgtcagcagtggcctccggagtagacgaatcctccgcaatcattgcgggctgctccgccaccggctcctcccctggcaatgtggggaacaaagcgccaaggcccttaccaagtcgtgattttgatgccattacttgttcctcctcgcatcaatggtgtcaaggacttgttgcgaacgctgtgcgatttccaaagctgcttcaccatacgatatggcacctatgccacgaggatcataggcaatcaccgattgggagaaactcggcgcttcggagatcttgactgaacgcgggatggtggtattcagcacaatgctgggatagtgtcccttaacctcgttatatacttcacggctcaatagcgttcggcgatcgaacatcgtgacgagcatggtggacaccagcagtacgggattgaaatgctcttgcaccaaaccaatcgtgttaatcagctggccaagaccctccaatgcgtaatactcagcctggataggaatcagcatctcggtcactgcacacatggcgttgatgaccaagaggcccaagctgggcgggcaatcaatgaacacgtaatcatagtgtttatctgattgacgtaggtagcggtctagggcctccttcagcaacgtgtttcggttgggcagatcagccacttccaactcagcaccgctgagatcgattgatgcaggcacaacatcaagtgtgggaaaatcaggacagaccgtgataacatcacccagatcggaacgcccctcgataacgtcatagaccgagggctctcccgatgcatgagatacacccaacgccgtagaggcattgccctgcgggtccatatcgatgaccaacacctgcgcgcccttgttcgccagcgccgcagcggtgtttaccgtggatgtggttttacccactccccccttctggttggccacggcgatacgacgggtacgttgaggtttggggaaatcggttttcttgagtacatcgtagcgtgagctttcatcagccatttggctaccaagcactgaaccgtgaccatcgaatattcgctgaagcgtttcggaagccgattctataggttccgactgatgatccttggtggccatcgctcctccttgcacagacgtaagttccagtgttctcattcgtatggacatgatgctcgttatccacaattgcgatatgcaatgtggataagtgtggataagtgtgaatgacgttgagtgttagattgtgtattcacagacgaaaaacattgaaaaatcaatgttttcatcattatgcacatcgtcccgtaaaaatgtggataacttttacgcacatatggaaatgtggataactcaatcagtactccactcatcgcttatccacaatcaccacgtgggtaggctcaagatccggcccgacagccgcctcaacgacacgtggacgacgaccaccgaattttgcaatctccttgccagccttgtcgatttcagcctgagcagaccgtcccttcagtgcgatcaactgtcctgacggtttcagcaacggcaacgtccagccagagagtttggtcataggagcaaccgcacgacacgtgacaacagcgaacggatgaatttcccgcttccgtacctgctggatgacggcatcggagcgtccacgaataatctcaacgttctgcagttgcatcaggtcaacacattcatgcaaccattcgattcgccgctccatcggctcaatcagcgtgaagtcatgatccggcaaacacgcggcagccaccaatccaggaaaaccaccaccactgccgacgtcggcagctgttttgaagcgaataccattcgtcgcattccgaacgtacggcacaatcgcagcggaattcagaatatgccgttcccaaatgatatcgacgtcacgggggccgatcaatccacgaggttcaccctcttcggcaatcttggcatggaaacgctccaacttcggcaacgcatcacccaagacctcagcaagtacaggtgacccctgcagctgatccgtcatagccatctccctcaccatgtttcacgtgaaacaatcaacatggagaatggcgccgctcattacgacgccattctccatgcggtcactttagtttgttcaaagacaacatccgtcgaacgtccctgtcatctcaaaaaaactcgccgagcaattactcctgatcaagctcgtcgtcttcggcagtatcctcgactttattcttgagatacaccgtcacgtaacgatgaggctcctcaccgtgcgagcgagacttcagcccctcttcccgaaccacatcgtgaacgactttacgttcgaaggaattcatcggcttcaagtcatacggctcgccggaatccttcactgcgtcaatggcatccaaggcgatatcacggaggtgctgacgcttgcgcttcaggaaaccgtcgacatccacaatcagatgagaacgctcgccggtcttctgctgtacagccagacgagtcaattgctgcagagcatcaacgacttcaccattacggccaataagatgtttgatgtcagtatcgtcatcagcaacgatttgcacggtggggcggtcattacgcacgcccatctcaatgtcgccctcatagtcggcgatatccagtaggccttcaaggtaatccgcggcgatgtcagcctcttcgttgagctgatcgatcgacttcacgtcatcctgtgccatacgctactccttcatgtcgtgtttgaattccaagtctaagccctgctcccccgaacagagaaagtaatgtcggtgcgtgttgaatgtttcacgtgaaacatcgaactcgcaccgacatagtcgtcacttctttttgcgcttgcgcacgggctgttgacgctgatagccctgagtggccttacgctcggcctcttccttggccttggccaatgcttcttcttccagagagggcaggccggcctttgcgcggcgagcattctcattgcgatgatcgcgcttctccttgtccgccgcagccggagagccaggggtcgggaatgcgtacacctgccacaatgtgcggcagaggttgcacacgttgttggtcagccagtagaccagcacggcgaacggcatggcgacaccggagaagatgtacatcaccgggaagagccacagcatagccttctgcatggtctcggtctgcttgttcatcgaagcagctgccatgttgcgcttcatgctgaagtactgcataaaccacaggcagaaacacatcaggaacacgaagataccgatgaccgccttgccactagcggcagcactggtgaagttatcggtcacgctgacaatgccgaacacatcggtttgggtgaattgcttggcggttgctacgtcgaacgcgcccaacgcatcgcgtttaccgttggcaatgtatggaatggcggacagcgtgtagaacatggacatgaacaccgggccctgaatgagcataggcaagcaggagccagccggattggcgtcattgtcttgatacagtttcatggtttcacgactcatggcttccttggaagcctgatccgtcttacctttgtacttgttctgaatacgctgcatcttcggcgccaatgcctgcatcttgcgcatcgacttcatctgcttgtagaacagcgggaagatacaagcctgcaccaccagcaccaggatgataatggcaagcacccatgagacaccaatcgggctcacgcccagcatcacgaaaaagtcatgcacgatcttcatgatccaggtctgcaaccactcaacgggagtcaggattttatatagaaatccccaaaacccgctatcaagcagaaattcatttgagttcatcgttgggcctctctttgggttgtggccaatggtgtcagtcgaggctcttcatgagccttcgaccacgaaaacctgtaaaaaacggaataccgttgtggaacatcgtcgattcccccacgactccacggccggcaacgcagtaatctcagcacggcgagcactccccctttgaacgcgccataccgttccaatgcctcaatggcataattcgagcacgttggataatacttgcaacaaggcggtgtgtttgccgagatgtgctgttgataccagcgcaccccaccaatcatcaccgccttgaaagaagctgtcatgcctcagccaccttatgcgccaccgtggcaaaagccttcgcgatctgctgatctagcgaagcgaacgatgcggtcgctgcactgggcttggcgcgcaaaacgatatcgcaatgcgcgggcagcagatcctcatgggctctggccaatacacgaaacctacgcttcaccgtattacgggtgaccgcatgtcctaccgatttggagacagctaatcccaaacggcgatgcaccgtccggtcgtcatcatcatgatggtcgtcgggcaccaaatagtgcacgacgatatccttgccacctgctttgcgccggcgtttcagcacggtgacgaaatcacgatggctttgaagcctctccacctcgactatgcctgtggcactgatcggaatgatcaggcggagagggacttgcggcccttggcacggcgacggttaatcaccgcacggccagaacgggtgcgcatgcgcaggcggaagccgtgcttcatgtggcgacgacggttgttcggctggaacgtcctcttcataatccattgctcctaggtctattcggcaacgcttcgcgctgccctcacgtgagtcaagctataccaaagtactctcacccctaccctcaagtcaaaacggacggagtattttcacatttcgacacgttgcgagacacgccccaaatctcttataatcggcggaataccaaccattcacggccaaaagttatccacaaattacatgtttgttattcacaatccagttatttcaacacgcgacacggtggataacttgtctaaaccagagtaaatattatctgttgtacgtatttcgccacagcgacagaaggggccacc

SEQ ID NO: 22 - DNA, 10230 bp, Bifidobacterium longum
  source 1..10230: mol_type = genomic DNA
gatacccggtttaaggaattgactctcccggagggcgagccgtggatgtcgcacggcttcgtttccaagatcgtcgcgcaggtctctttgccctacaggaggcccaaggacaacgccaaggagatagtccggcgtaatggcaatctggtggtccggttcatcagtggcgaggattgtctgccttacggtaagtatccgcgtctgttcgagctgtgggcgtgcacgatgatcaagacgaataacccgtgcttcgacccggaaacgaacgtattacatctgggcaccacgttccgcgagttcctgcgcatgattgacgtgcaggtcggcggacggcagcttaaatccatcaagccccagttggagcgtttgttcgcctgctcctaccacatctccaacaacactgagaacgagacgaacatgcgcaacttcgttgtcgcggagaaatcacgcattgactggctgcggaacgagccgcaggcccatggcctgttcgagaactgggtgcagctgagtcaaggctacgtcgacatgctgcgcgaccatccggtgccggttgacctcaaggtgatagcgcgattgcgcaagcctatggcgattgatgtgtattggtggctgaccaagcgcgtctataatctgcacgaacctgtgacgatcacctggcagcagctttatcagcagtttggcaatgattcggaacttcggaagttcaaggagaactttcgcaatgccttggctgaggttaccgaggtgtacccgtgccgggtcacgttggggccgcagcgggtgacggtgttcccgaaccggacgagcgtgcccacggtggcgcagacgcgggccatcgaacgcagccgtgaggacgacaccaagcggagcgagagggagcggaggaacgccgaacgcgccgaggaacggcgtgcgagggcagagtcccgtgccgaggagcaacggcagcgcgaggagatccagcggcgggtgtccgaggaacgcaagcggcatggcggcagcatgttcgccggctccgccggctatgtggaaggggaaccggatgagacaggggcagaggatgacgtctggcatgatcccgacgagatgacgctgttctgactggaggtattcatgaattattgctctggcgtataaaagagcaaattcaaacgaagaaaccggcatacggccattagccgttctatacttaaagagacggcgaatccaacgagggcttcgcgtcagagaaaggggaaattccgatgaaaccgcgacggcggcgtatcgccgcaatggtaactagtttagcagcagcgctggttatgtcactctcatgcgtgacgactgcatccgcatcttctgtatatctttctgtgccaatttacgtacaggaacaaagtaactggtgctgggccgcgacatcgaaaagcgtatccgtatatctgggaggcagcaattcttcccaatgccagtatgtgaaatggggaaagaactcgtcttcttgcgccaatgtaaccggagatttatcgactgacgtgaggcgcgccttgtcaagtgcgggcatccgcaacacaggttcgatgataaatagtgccgcaagcactgcaatcgtcagcgggcaaattaacaatagcaaaccgttgatggtacgttggggctgggatagcggcggtggccatatgcttgtgataaggggatatacctctgatccgggctatcttgttgtctcttacatcgatccgttgcagtcgtattacaacagtggaacttacgactggatgaaaagcggaagtggtcatacatggacgcacacacgatatggctttagccgataaagggggaacaaatgagtactttctataatgttcgtaaatccctgattcaggcgttccgtatattattcgcggcgatgttatttgtcgttgctataggaacggtctgccctgatatcgctcgcgcggagaatctgcccgagagcacgcaaatcaacgagttcgctcaaagcgacgaggcgaggacccaaacgctggcgcttatggaagctgtccagaacgacggaagccctgaagcatccacgcagattgcaataggttatgccgataaagtgcattatctacgctatgacgattcaggtgccataacgaacacaatcacggacccgcaggattacgactgggtggcacccgttgaggttgaaggtagattagtgggaaggatcacgatctgggacaacaacggaagtctggaagtggggaatttttctcccgatatagaagaggcgtccctgctcgatgatgatgacagcaccactctcatcagcgatggcttctcccgtgcgtattattcgatggaaaacagcagaatctcacctctcaacgaagctgcacgcgctattgtccccgagtctgtacaagtggagcagggagacatcgcgatccgtaagaacgcgccatctgggtttgacgattcagccggcggtggatctatcggcgtcgtgtcttccgacaccgcaacgggcacggattcttccatgaacatattcatgttgatggctgtgttcattgtcgtgacagcagttctcgcccttatgtgcaggattctgtggcgcggtccgaaccggcggaacgatcgatgaggaagagacaaccattgttttccggcctgtgtctggcggtatttgcgctcatgtcgggttgtaccggagcaccggttcaaagcgacgatgccggcgctcatctcgaatttcgcgcctatgcggagtcggggaccgtcaggattgagtcgcagagcgagacggttctcgaaacccgaatcaaaggggactggttgaaagtcgctccggacgattggcttgagaacgacaggccgctcaccttcacggttgaacgtgattccggcggagtggaagacaacgtctcctgcgaaatcatattcagcggccacacgattgacgaacgacgagccaccggccccgaaacatcggccacatgccagtatgacacatggcgggatgcgattgactactgaaaatattcttagctgaaagcccgtccgggcgtggaagctcggacgggccgtggtgccgttattggcggctgtgtgcgctgatcgcgtatgctgtgagtgacagcaccgcgatgtcggccgcgatgggatgcatcgcgggagcgaggctgatgacgatgaccgccatcagccagaccacgaggccgccgcgcggccccttttctggtttgcgcatggcgcaatcctttcagtaagccgcgccgcgactggcgcggcagcgtcgtccggcggttgccggacggtcgttccggcccctgcaacaagaccttctcgacatgcacgatggtatcggctaacatggaagtgccggttcgaggcactgcaaacttcctcccattccaaggcggtgcgcaacgacttcttcgggaggatggccgagaccggtgggtggccctgattccaccccctttcagtaagcgttgggccggtgccttcggacaccggccctttgcattgccccgtgttcgggcacgcgcctgtccgttgcgtcgatgtctgctctagggttctgcgactattcgtgcagcatccgcgctatggcttggttgatggtctcgcccattttcatgccggtgtcagcgcagtatcgtttgagttcggctttgaggtccgcgtccatctggaacgtggtcatgaccttgcggacggtttcgccgtcgccgcgtccggcgttgtcctgcacgtccatgagcttggtcacgggttttccttcgagttctcggcgtggctgcatgctcatggtaagtcgtcccgaggccttcttcatcgcagttcccccctcagctcgttccacacgtcctcgtatccgttgaggttgcttctgaatgtgtggccgaaatcggccttgaagtcctcgcgcagcgggatctccgtgtcgaagatgccggccccgtattcctcgacggcggtcctgaacgcgcgcagggcgttggtgcccttgcgggccatgacgatgagcacggcgtagtccttgccggcgtcctggcattgggcggcggtgagcatggtctgctgcaggtcgatgggcgaggacagggtggggatgaccacgaagtcggcggtcttgatggcctcgtccacgacggcgccgttcggcggggtgtcgatgacgatcagttcgccgttgcggtccgggcggcgttcgcgcatgcgccgtatctcggcctggttcctcgacacgacggggaaggggagcgggtcgtccgcgtcctcggcggcttgggcccacaatgtggcgctgccttgcgggtcggtgtccacgaccgtcacgctcagtccggatctttgggccgcggtggctatcgccagcgagctggtggtcttgccgaccccgcccttgatgttgatcacgccgatgatcatcctgcctccatgttatttaaatatttatttttatttatttatttattgtagcgtggccgatggtcttcggccccaaggtcagatgccggccccgtagcctgcgccgtggcccgcgcccgccgaccatgtcggcgtcgcctggaaggggtccgcatcatacgagatcgagggctgggagtcgtcgtagccgagcaggtgttcggtctcgcgttcgcggagcatggcggtgtagtcggcccatccgggtcggcggccgagggcccgttcgagttcggccaggtcgttcgtgatctgcctgccacgcggggcgtcctgccatgcctggtcgacggcggttctgtcgtgttcgcgcacttcgaggctctccctgagcttccgggtcgcctggtcgatctggcgtggggtcatggtgcggagctggtcccggtccaggcgttggtaggcggcggtctcgaccagggtgccgagcacggcgtcgtcgcggtatcgtatgtcctccggttccttgaagtacggttcgaattcgtcgcggtagttgaactggtcgttccgcagcaccggcatggcccatccgccccagttcggatgttcctcccggaatccggtcagctcgttccagaacccgcggtgccaaccgtcttcgagccggccgaggacggagttgtactcatcgatcgcgtcgggtctgcgcatgtcgcgcaacgcggccaggcgcgcccggtcgtccagggtctccgcatgccgtatgtccgccatgctccggcggtccgcgttggcccgtaggacctcctcgtattcgttgccaagctcttggacacgggcgcgcagacgctccggcgcactgatctccggatcacgttcccgctcgtgttcgaggccacgcatccgatcgcgcagatcggtcacggccggcgtctcctccgccttggcccgggctgaggcgatgcggagctcatgattgctccggtattcgccgtagccgatgtgccaccggtcctcgaactccgcccgtgcggcctggtatcgcatcagcgactggttcgcgcgttcggtggcctctccggccagtcggcggcggcccatcacgaagctcctgtatcccggttcgttccggtcggtcaggcggagcctttcggtctcgtcctcgtggtgacgttccagcagccggtgcacgtcccgccagtcgtccgccatgtcccgttcgagccttgcggtctcggcgtcaagcgccgcgccgcattcgtcggacagttcgcgcagacggtcccggtaatcgtccgcgacgtgttcggcccgcctccgcgccgtctcgtactgatcccgcatgtcgcggatgcgttcggacagttcgccggcgcgacgctgctcccgttcgatctccgcatggagctccggcaacggctccgacgcccatacccttcgatcggcgccctgcaggaggccggtcttccgttcttgcagccatcggtcgaggtcatgcagttcggacaactcctcggcgttcaggccggcgtcgacgggttcggccatctgctcgatctgctcgcggagattgttcgcggcggcttcgagccccttgtctcccttgtccctggcgatgatgcgggtcagggtgtcgcgggcgtcctcgtcgccgcccgcggtcatgaacacctggttgccggtcttcccgcgggtcagggccacataggcgtcggcaccggacgcgccctcggcgacgtagaagatcgcgtgcccgctcgtgacgccctgggcgccgtaggtggtgctcgcgtagccgagctgcacggcctcggccacgtattcggcggggagcctgtaggtgcgtttcccgtccccgacgagcatccccgaccgttcgtcgatcccgagcacggtgaacgtctgccggttcgccactcctatatggttgtcgttcctgcgggtcatgacgatgtcgcccacatggatctcctggccgtcgatcatggaggcgcaacgctcgtcgcccaactggccggcgtcgagcctcaaccgttggatcgcccggttgacctcgtcggcctgccggttcgtgacggtgctgatcgtggtgtccgggtgctccatccacgcggcggctatcgcgttcacggtcgcctcgtcgctgtcccaatgccggaccatgccgcgatcgaacagttcgccggccaaccgttcggcgttggcgggtgtccgttcgcgcaggcgtatggtgtaggccgcgtagtcggggtccttgaaccggtgcacgtcgcgcatggccaccacgttgcccgtgtaccgttcggccagttgcatgacgccgccgcgtcccacggcgttcagttgcatggtgtcgcccaccagcgtcagtctcgccccggtctcgtcggccacgcgcagcagcgcaagcgcctggtcctggtccatcatgccggcctcgtccacgaccaggaacgtgtcatgatccagccggtactcgtcgggcacgccccggtaggtgttgccgcgatggtcggtctgtccctcggtcacgcggtaccaggggtgttcggggtcggtctcgtcgtgacgccagccgtatgcctccagcagacgcatcagggtccccgtcccggtgccgacctcctcgcccgcgaccagcgccgccttctgggtcggcgtggcgatgaccagccgtttgccgttctcccggcaatagtcgttgaccgcgttgagcatgtgggtcttgcccgcgccggccgcgccctcgaccacggcgaggggatcgcccttgcagatcgtttcgacggcctcgcgttggccggcgtccagcgtgtaccgttccgcgagatcgtccagacgcgggttcgcggtctcctcgacgccgcgggcggccagacggcccttgagctcgtcctcgcactcgaccacggcccggcacgtcagcgacttcgcccaaccggccctcgcccgcgggtcctcgctcagcatgacgcacagttccctggcccggtcgcgtatcccctcggccagggctttcagctcgtcgcgcgttcccgtcgccccggtcaggcgcacctggtcgtaggcggcgacctccagctgttccaggctccacgcgctgttcatctcccgcaacgcggcgacggccgccacggcgcaccgccgcacggcgtcggcgccgaacctgacggcccgtggccgcggctccgccgccgcgccgtcgagcatggcggggatgtcgtagcccgcggcgcgcagctcctcgttccacgccccgtagtccacgcgcgtgttccaccgtcccttggcctgcctcgtgtcggcccacgcctggaggcgcagacgcatcagggtccgctcgtcgggctccgccaccgtcccgtagccgaccatgcccacgacctcgccggtctccgggtcacgcacccggcgcatgccgtccgcatgcgcggccctccactcgtccaccagctcggccatacgcgcgttgatcgcgtcccggcgtttgctgaacacgtccgaagcgttcccgagctccggcacacgcccctgcatgtccagagtcatgccgtgcgcggccatcgcgtcgcacaggccggcgtccccgtacaccgtagtctcgtacacggaacggatgttctcgtacatgccgaacagtcggctgctgtcgatgctgtaccattcatcgccgacccgcacccggttgatcagctccaggtggcggtgcagctcagggtcgccggcacggctggtgaaatgggtcgcggacacgaacatcacctcgtccggccgcacccaccgccgtctgccgtccccgcagcgcagacgcaccgtcagccgttcggacaggaacctcctgaccgcctcctcgccacgcgcctgggccttcatgcgggcctcgcgcacgtccccgtacacaaccgacgccacgtccagatccttgctgtcgttcaaagggatctcataggcgcgcacgttccccgcacggaacgacttcaacagctccccgctgtccgggtcgcgcccgtccagcagcatctccaacccgccatcacgcaaccgcttcgaagggcattccgtgccatccgcgtaacgatggaagcgcagaccgtcagaatgctcgccaaggtacgcttcgaaaccctgtccggcctgattgcagcctttcaggtactcctccagggaacgccccccggtggtgaccttgacgatatgcccacgcatgacaccaattctaccccgttgccacgttggataccggcttgcccacgcagtgggcataagtaccttgctattgattaatgattggagttttgtgggtgaggtatcgggtcggatgatgctgctggaatatggtgggtcgtatggatatgcgtattggggttggtgatggcgtgggggatacgggcggttgatgtgtgatcatgcggtggatcggctggcggatagatagaattggatacgcatcgggcattgcatatggaaaggacgcataccaatggatgacgcgatgtacgacatgcagaccggctcgcaggacgacggcgcggggcacgagcccgtaaagcgcaaaccggtccgcccggccgagctgcgcctggacgactccaaggagaacctcggcctcgaacgggtcgattacggctacctctccccatacctcgaaacccaggagacacccgcggacagggtcgcgcgccggctgataaccaccccgtcgatgcacagccacagggacaacccccaatggtggagcctcccggtcggccacatcggcaggatcaaggcgcaaaagaccgccgcacgatgggccagagcacgcacgctcgacggcagaacggtcaaattctccgccgtcgcgttcccgatccgtgacagcgacaagaacctctggggcgtcgccatcagctacgaccccgccgaccaaccggccaccgaaccgcacgagccgacagcagaccaacccacattcgacaccggacattgaccgggagtacgggcgggcactgcaaggggatgcgtctggcggacgtgtccccttgcccggctagccgagggcacatacctacctaaagcccttgacttgcttagggcctcctcatgatcctcaacgtatcctcgaccaacagagtagccgccgcgatgtagatcgcccatcgccagtggacgccgataccgaccagcgcagacgtacgttcgataaggttccaaaacggcgcaatcatttccatgacggcgtctatgcagatagcaaagttccgttgaaattccaacgatttaacagtgcgttccgtatatctagaaccgccgctcaatcctattcctgcaaggactgggggtcacagcgcgtacctaaagcccctcgaatggtggctaaagcccacgacgcatgacggaaacctacctaaagcccctcagatggccgaaacgtctcacggtggctaaagcccacgtgagttatccacatccggcagaggtcctttcaaaattcgctctctaagtatctgtatatctgtatatctgggacccccgctcagccttactgccacaagggctaagggcacatgagcgtccctaaagcccctcaaaacgtccctaaagcccctcaaaacgtccctaaagcccctcggcgtccctaaaatacacgggcttttgtccttaaagtacacggcagttatccaccaagtgtccttaaagtacacgaccgcgacagcgtgtccttaaagtacacggtctttgtggtatgtttgtccctaaagtacacaccggattttggtatgaaaatgcctccgcgaggctggcacctccggaggcgtggcaaccacgaaaggaccgtgattggcaatggttgat

SEQ ID NO: 23 - DNA, 6489 bp, Bifidobacterium longum
  source 1..6489: mol_type = genomic DNA
tcatgcgcgcggaaatcggcgggggcggcacgttcggcattgatgaacgcttcgccctcgcggcttggatgtccaaaccggctccgttcttccgggtttaggtttggtgtgtagacgccgtgccccgtgccgtgctgccgtggggtctagcgtcctgattgataaccgacggaacgcagggaggaaccgatgaccaggagcgtcgaggagcagatggccgacatcgagcgccggatgaagcagctcagggcgcgcaaacagcgcatcgtggctagggagaacgccaaggcgcgcaagcggcgcacccatctgatcatccggctgggcggcatcctctccaacgagggcgtgcttggctacgacgagggcgtctggaacgacgagggcaaccggcaaaggctgctggacatgctcaaggcccatgccgccgaactgcgcgcatgggcctctgacgcgggcgtgaggctccccagcgctgagtcggcgggtgagctgcgggaacaggttcgtgacctgccccaagagcctcagatacaggagcagccgggctatggctaccagcccggattccaacagccacagcaatggcagcagcagccttggaactgagtcggtttcttctcttcatcggggcggagcccctttttatagaatcttttgtactcttttagactccccgcaggccttacggcagtaggggaaacgcactattaaaggggagaaaatgggagattaaaggggagattttgggaattatttaggggaggttttgggagaataaaggacgcttttgaggaataaaaacgaggttttgggagaataaagggtagaaaatataaaaatctcgtttttatggtagaatgcagtcatgtccgatgagatcgtgaagtactcgaaccagttcaacaatcaggcgctgcgcaagttcaccgcgctcgatcttgatttgctgatggccatcgcgtctcgcgtgcgggacaagggcacggacgaggtggcgttcacgttcgaagaattgaagcggctggccggacttcagaggaacatgaccaacgatgagttcgccaagcagattgccaatgtgaaccgtcgcctgctcgcgctcaacttcgagttccagaacgaagagcacgacatcatccagttcgccctgttcgcaggcttcgtcaccagcccgaccaaacgcacactcaccgtatcggtgaactcgcgcttctcgttcctgcttaacgacctcacctcgcagttcacccgcttcgagctggccgagttcacggccctgcgctccagctacgccaaggagtgctacaggaggctcaagcagtaccgacaaaccggtgtgtggaaggtcagccttgaggacttccgccgactgctcgacgtacccaaatcgtatcggccgagcgaaatcaacaagtatgttcttaagccgattgaggaggagttgggacctctgctgaatctgaaggtgcatcgcaagtacctgaagaagaagccgggacgtggccgcgcttcccttgtcgggttcgaatttgaatttgacccggagaaggtacccggcggcgctcccgctccgcgcgtggagctgtccggctccgtggtgaccgatgaggcgaggaagtcgctcagggacgtgtcgaagacgcccgtgcccgatctgtcggtgccgggcgagggaccggcgctcgaccctgatactcaggcgttcctcgacgcgcacggcggtcatggattcgccggtgccgaggggtatgtctccgactggccgagtgctgcgtgatggtatttgacgtcctcccggtgttgaaacaccgggattccaacacgttgttatcgtgttgaggtttcgcacgtcatggtggaagcgttcttcccgcgataagcgggttggacggctgattccgtttcggcgtgctcggcttcgtccaagccgatgagatggttcaatccccgtttgaggatgttgttggccgcgttcaagtcggcgttcatgctcatgtggcattgcttgcactcgaagtccgcttggctttcgcggtttcgactgtcgcaataaccgcattcactgcatgtctgcgacgtgtacgcggggttgacgagtataagccggttctgtccggtcagccgggtcttgtattcgagtttttcgactataccggcgagaccggcggagcgtagggcatggttgaggccgcgtttcgccgactggccgttatgcaggtacgcgcccggcctgtctgggtcgggtttcgccttggctttgcgactcatgccttgcaggttgaggtcttccagcgcgatgaggtcgtagtcatggacgagcatgctggtggtcttgtgctgccagtcgtctatgattctgtgggccttcgcgtacagtcggctgatttcccgaccggtacgctcgtaggtgcggctcggattgcgacggtattccctcaccgtcttgcccgacatgttgacccgtcgcgcctgagccttctgacggcggcgtatttcacggtcgatacgctccaaccgctgcttgggaaggtcgaggaaacgattgtcggacgtggcaagtgtgtgcgcgcaacccctgtctaagccgaccatggcacccgtgcgctcacggcctatcggcagcgggtcgttgacgaacacgagcgtgcgtcgtgtccagttcaccccgatgctcgtatagtcgcggatgggctggctgacgcggacgcggatgtggatgctgtaccggcacggctggccgtccagacgatattcgccggggttctggccggttatcacgacctcgccgtgatgccggttcaaccgccggtagttcgcgttcgaccccttattgtgccagcagacgaaatacaggtcgtcatgacgggatttgaaccggggcatcatgcccggattccgatgctttttcttcaacgttctgcggcgcttgttcgcgctccaccagtccgtgttctctatccggttcggggattgcaaaaccatcgcgggcatggccgtaagccatgagcattccaatcgcgcctgacggtcggaacgcatgtccggcctcccgttcaacgggacggccgtctgggattccctgtcccacttggtgcgacgggaacgcaactggttgtatcggcaacgccacccgtcgcacagccaacgcatcactacgtcgggattggtcgaatacagggggacttgctgtccgtcctcggtcgcacacatgccgagatatggggcggctccccgtatcagaacacgttctatcacgaccttctgggacatgattacgattatatcactacgcgcgtataatgaaaaagacttaaaaggaaaggagagggtggttcctcccggcattgaaataccgggcatccccgcccggaaactggtgaaagcccgtccgggcttgcgctcggacgggccgggtgccgtttagcggctgtttctcatcgcccagacggccagggccgtgaggatgatgtccgcggcgatgggatgcaccgccggtgcgagacagacggcgatgaccgccatcagcaaatcaagatcgagcgcggtgaacttgcggcggaacgagccagggctgaactggatgcgtataaggcggcccacgatggtctgacaccattcgaggtggccagacgcagccatgattcacaggccatgcccgatgatcggatggagcctggtatcgagccgactcttttctgaacaaggggcctgccgcgggctccgacccgcggcaggttgcgccgtcaacggcggctggatgccatcgcccagacggccagggccgtcacggtgatgtcggccgcgatgggatccatcacgggagcgaggcagatgacgatgaccgccatcagccatatccagggccggccgtgcggccccttgttacccatgcgcatgtgctgcgcctttcgttcgggccgcgccgcgactggcgcggcagcgtcgcccggcggatgccgggcggtcggttttcgtccctgctacaagacgtccatcgacgacgccaatcgtatcggctaagatggaaacgccggcggaggcgctgctaacttcccccttacgatcaggcgggcatgcatgacttttcggggatggccgatgccggcgggatgggttacccgccatcccctttgattgggccgtggccccgcgtcttcggatgcggggccggcgtcttcaaacaccaaccctttgcattactggtctgttcaatccaaggtccaagagctataatttccttgtcagacgcacgtctggcatacctaatcaaggggggcaaaaatgttacgtaccaagcatttgaagatggcagtggttccaatgactctgctggcgctcctgtcgacggcagtcccggtggcatctgctcaagaaaccactgacgagtcgttctatgaacttaccaccactccgtcgggcggggacatgattgtcggcgaacctggcacaacgattctctttgattccagcaacggcgaattggtggacgtgctgccgccgagcgaggctgaagattattcggtaactgtctcgcgtggatgcgctgattccaatgctggatgctgggctggcgggaacgctttgggtgacatgcagtttgcaggcaccggaacggcaacggggtcctggccgtatcgcaacagctatacgaccggcaataagtcgggacagatcaccttcgcaatcaacggagttacatacacccctgtcgcagctggtccgtggatgcgcatcgccacggcagacggctctggcgtcgacggcgtatccgttacccgctggtaaggatgtctttctaaatttcgggccggtgtcttcggatgccggccctttgcgttcccggcgttctcacaggccgagtccgtggcctcccgtgccccagcccatgccgatgttgagcgggtcggcggggtcggagaggtcccatgtctcctccatgtcgggttcggcctgtttttcggcctgtttgcgttcgttttcggccagccgctcgtcaagccgtgtcttgaacctgtcggtgagcgcctttttcgtcctgatgggcttcgggggttcctgcggggcctgtggcggcgtttcacgagcctgcgggcgttcctgtggcctttcggccggttcagggcttgaaggggcctgtggcgcgcctgagggccgttggcggcgtttgacggccgtcaggatgccttgcgcttggtcggagagccgcccgatcatggccctaagcgcgtcgaggagccggttcagggcctggatgcgccggttctcctcgcacaggtcgcccctgccgccgcgtttctccatctcgcggctggcgtatccctcgtggatggtggggatgcgttcgatgccccgcgccttgaagctccgatggtcgatgacggcgtatccggggagcagggcgttgcaggagtcggcccactcgcgcctgagcctttcgaggaactccttggagtccaaggggttgttgctcacgttgacgcgcttccagaccttgcggtttctggcgccgatcttctgccgtccggtgtcggggtcgatgacggggatgcgccggccgttggcgtccaacgcgaactcgctgcggctcttcgccgcccatctgccggtcttcgggtcgatgcgccggttggcgacgaggatgtgcgcgtgggggttacgtccgtccttgtcggtgtggatggcgtacgtgcaggcgtagccgttggccgtgatgttccatgagatgaagtcctccagtacgcggaagcgttcgcgggcgtcgaactcgcggggcagggcgaccatgatcttcttcgcgggcctcgcgtcggaacgtttctcggccatctcgacggcgttgaacaaacgctccgggtcgaggtactcgccgggcgcgccctcgggcagcatcgtgcatacatgctcgacgcgctccctgcggccgaacccgttgaacgcctcgccggtgcgctcgtcgcgcatccgacgcgaggtgatgtacgagcaggaggcgacggcgctggagccggcggcacggctcacgttcgacacgtgcaacgagtagatcgccacgggactgtactcctttccgggaatccaaagggccgggaggcccgttggccctccaccggggaggtggccggcaccccgccgggacggggcgcggatccaagcggcgcacgcttggcccccacggagtggcccctcgggagagcgcgcttacgctgaatgttaccaccggtaacatgtaagtgcgccctcaatgaaattgagggacttccacctgaccttgcggggatggttccgttaccggcgtgtcggtcgacgcatagagcggtgcatggacgaattttctgatgctcttatgcaatgggcttggcgattcatgggattgatttacggggagtttcctgagactgcggcaaggctgatcctctcggctgctcttcgcaagctgccgcagcttgcgaagaggcttttccggtcggtgtttccctcccgtggccg

SEQ ID NO: 24 - DNA, 3680 bp, Bifidobacterium longum
  source 1..3680: mol_type = genomic DNA
ggaggctcccccggaagggtgggaatccaaagggcaacgcccgtggcccccggagggcgcgcttacggaaaatgcaacctccggttgcatgtaagtgcgccctaatctttgattagggatttccttgctggtagaatcatatcaccatacggatgatgcagaccatgtaaggagccgtttcgatggtgaagagcctggatgagcagatcaagtccctgcaggagaggcaggcccagctcaaggcccgcgagaacgacctcatggcgcggcgcagggaacgcgaacgcagggcccgcaccaagcgcctgatcgaggtcggcgcgatggccgagtcggccgcgggcttcgagggcggcgacgagagggccaaggagcgcatagcccgcctcgtgcagctcggctcgctggtggaagccatgtgctccaccgacgtgatggacaactacacgagccgcgaggacctcaagaccaccgtcaccaaggccctggaacacaacgtcagaaccagcgatggcatgaactggaacctgcacgacctggtgtacgaggcgctgagcgaggaatggggcagaagggacggcgagatcagcgacctctgggcggacgacgggccaagcggataccagccaccctcatacgagccggtcaaccccgaacgcaggactccccaaacaccctccgatggcctgatctgacgtccaaaaaaaggcgccgtgcgccctttttaaatcttttaaaatctttttacattcttttaggccctccgcagcccttggaaacattgggctcagaggatgttactggggacaaaaagggagcgaaccggggacaaaaagggagcgaaccggggacaaaaagggagcgaaccggggacaaaaagggagcgaaccggggacgttgctaaaatgtgtctcctttttgatcaaggtggggactcaaattatttgtggactaacttaatttgagtcccccataggagctatgctaaggccatgtccaatgagatcgtgaagttcagcaaccagttcaacaacgtggcactgaagaagttcgacgccgtgcacctggacgtgctcatggcgatcgcctcaagggtgagggagaagggcacggccacggtggagttctcgttcgaggagctgcgcggcctcatgcggctgaggaagaacctgaccaacaggcagctggccgacaagatcgtgcagacgaacgcgcggctgctggcgttgaactacatgttcgaggattcgggcaagatcatccagttcgcgctgttcacgaagttcgttaccgacccgcaggaggcgaccctcgcggttggggtcaacgaggagttcgcgttcctgctcaacgacctgaccagccagttcacgcgcttcgagctggccgagttcgccgacctcaagagcaagtacgccaaggagttctaccgcagggccaaacaataccgcagctccggaatctggaagatcagccgcgacgagttctgccgactgctcagcgttcccaaatccacagccgagcaagtgagagatctcaacaaacgagtcctcaagccgattatcgaggagtgtgggccactccttggactgaagatcgagcgccagtacgtgaaacgcaggctgtcggggttcgtgttcacgttcgcccgcgagacccctccggtgatcgacgccaggcccgtggaggcgaggaaggcggaggatgcgggccattggacgagcgtcgccgggtacggcgaggtgttcacgaccactgagctgttcgacgtgacggccgcgcgtgaccacttcgacggcaccgtggaggccggggaatgccgtttctgcgcgtttgacgctcgcaaccgcgaacatcatgcgcagaacgccggaaagctgttctagcggccgtgtccgcgcctctggggcggttgcgcgctccatgggtcgatctgccgctgttcggcctcccgctggcctgtgagcctgtccgtgcgctgtctgatctcgttgagcaggtcggccttggtcctgggggcctggcgtgattcgaacgggctggcctctccccagtcctcgggctcgctgaggtccagcggctcgtcgccggacggtgcgggccgtttcgtgtcctgcgtcgggttctccgcctgcgcgcgttgttcggccatacgcagtgcgagggccttcacctgttcggggcttggccgttcgctctcggcccgttcggcctgttcgagccgcctctccagttcggccacgagcctggtcctcggctgcatgtcgtggtcgtagatggccttggtggtcctcatgcggaacctgttggcctggtcccagtcggccgggatgtcggcgtcttcgagccacggcaccgccccgcgcagcctctcggactgctctccggccacctgctcggcgttccgcagcagcctgccgcgcttgaagatgttcgcgtccctggcctcgcgcgaggccgcccgcgccacgtcgatgatctgcttggcggcctcgtgctcctcggtgccgtggctcctccaccactcctcccggttccccacgtcggccctcgcgtccatgagttttccgcggatcgcggccgtgtggtcggccttgtcggcttcgagctggcggcgcgcgtcgccctcgaagtagcgccagttcggctcggccggttccggccgcgcctggcgtcggcgcagccgcccgatcttggcggcgaacagctcgcccaggcggtcgaatatccgtccgagttcggcgcggacggcggtcagcaggctgttgctgcgcctgatctcacggttggtctggcacctctcgctgacgcctccggcccgttcgatggccctggcggcgtatccctcgtggatggtgggttcgaggtcgctgccctggtcttcgaggctcctgtggtcgattctcgcggtttcgtccagccgcgcgttgcaggtgttcgcccaggactcgcgcagggccttgagcttggccttccggtcgagcgggttcagggacacgctcgtgcgcttccactgcctgcggccccgcttgtcggtcttctgcctgccggtctcggggtcgatcagcggaacccgctcgccccgctcgtccagcacgtactccatgcgctgcttgagccgggcccagccgcccgtggccgggtcgatctgccggttggcgacgaggatgtgcgcgtgcgggttgttgccccgcccgtcgtcgtggatggcgtaggtggccgcgtagccgtccgcgttcaggttctcgcggatgtactcctccagcgcctgcacgcgctgcctgggggtgaactcgcgcggcagggccacgacgatcttcttggccggcctcgccgtccggccggtctcgtgcagctcgaccgcgttgaacagcacggcggggtcggcgtactcggccggcgcgccctccggcagcagggtgccgacgcgcagcacgcgctccttgcgcccgtagtcgtaggtctcgccgcgacgctcgtcatgcacccgcctgccgctgatgtacgagagcgtggccgtggccttggaaccgctcgcgcggctcacgttggagacggacagatggtagatcgccatcggcttcggctcctttcgtgatcggcgcgggcggcggggtgcggggcctcggccctgcggcaaggggttcccaggggtgcggcgagcacccccgggcctgccg
